(19) United States
(12) Patent Application Publication
(10) Pub. No.: US 2022/0362351 A1
(43) Pub. Date: Nov. 17, 2022

(54) RECOMBINANT SIALIDASES AND METHODS OF USING THE SAME

(71) Applicant: Palleon Pharmaceuticals Inc., Waltham, MA (US)

(72) Inventors: Li Peng, Lexington, MA (US); Lizhi Cao, Stoneham, MA (US); Sandip A. Shelke, Belmont, MA (US); Andrew S. Turner, Waltham, MA (US); Lihui Xu, Chestnut Hill, MA (US); Wayne C. Gatlin, Wakefield, MA (US); James W. Broderick, Wellesley, MA (US); Karl D. Normington, Prides Crossing, MA (US); Sujata B. Nerle, Somerville, MA (US); Zakir B. Siddiquee, Cambridge, MA (US); Abhishek Das, Wayland, MA (US)

(21) Appl. No.: 17/624,123

(22) PCT Filed: Jul. 3, 2020
(86) PCT No.: PCT/US2020/040827

§ 371 Date: Dec. 30, 2021

Related U.S. Application Data
(60) Provisional application No. 62/957,027, filed on Jan. 3, 2020.
(60) Provisional application No. 62/870,336, filed on Jul. 3, 2019.

(51) Int. Cl. A61K 38/47; A61K 47/68; C12N 9/24

(52) U.S. Cl. CPC A61K 38/47; A61K 47/68; C12N 9/2402; C12Y 302/01018; C07K 2317/76; C07K 2319/31

(57) ABSTRACT

The invention relates generally to recombinant sialidases, methods and compositions for extending the serum half-life of the recombinant sialidases, and use of the same in the treatment of a sialic acid-related disorder.

### CROSS REFERENCE TO RELATED APPLICATIONS

[0001] This application claims the benefit of, and priority to, U.S. Provisional Patent Application Ser. No. 62/870,336, filed Jul. 3, 2019 and U.S. Provisional Patent Application Ser. No. 62/957,027, filed Jan. 3, 2020, the entire disclosure of each of which is hereby incorporated by reference in its entirety.

### FIELD OF THE INVENTION

[0002] The invention relates generally to recombinant sialidases, methods and compositions for extending the serum half-life of recombinant sialidases, and use of the same in the treatment of a sialic acid-related disorder.

### BACKGROUND

[0003] A growing body of evidence supports roles for glycans, and sialoglycans in particular, at various pathophysiological steps of tumor progression. Glycans regulate tumor proliferation, invasion, hematogenous metastasis and angiogenesis (Fuster et al. (2005) NAT. REV. CANCER 5(7): 526-42). The sialylation of cell surface glycoconjugates is frequently altered in cancers, resulting in the expression of sialylated tumor-associated carbohydrate antigens. The expression of sialylated glycans by tumor cells is often associated with increased aggressiveness and metastatic potential of a tumor.

[0004] It has recently become apparent that Siglecs (sialic acid-binding immunoglobulin-like lectins), a family of sialic acid binding lectins, play a role in cancer immune suppression by binding to hypersialylated cancer cells and mediating the suppression of signals from activating NK cell receptors, thereby inhibiting NK cell-mediated killing of tumor cells (Jandus et al. (2014) J. CLIN. INVEST. 124: 1810-1820; Läubli et al. (2014) PROC. NATL. ACAD. SCI. USA 111: 14211-14216; Hudak et al. (2014) NAT. CHEM. BIOL. 10: 69-75). Likewise, enzymatic removal of sialic acids by treatment with sialidase can enhance NK cell-mediated killing of tumor cells (Jandus, supra; Hudak, supra; Xiao et al. (2016) PROC. NATL. ACAD. SCI. USA 113(37): 10304-9.)

[0005] Cancer immunotherapy with immune checkpoint inhibitors, including antibodies blocking the PD-1/PD-L1 pathway, has improved the outcome of many cancer patients. However, despite advances that have been made to date, many patients do not respond to currently available immune checkpoint inhibitors. Accordingly, there is still a need for effective interventions that overcome the immune suppressive tumor microenvironment and for treating cancers associated with hypersialylated cancer cells.

### SUMMARY OF THE INVENTION

[0006] The invention is based, in part, upon the discovery that it is possible to treat a sialic acid-mediated disorder by administering a sialidase enzyme or a sialidase enzyme conjugated to a serum half-life enhancer. Surprisingly, it has been discovered that a sialidase or a sialidase enzyme conjugated to a serum half-life enhancer that lacks a targeting moiety (e.g., an antibody binding domain directed to a tumor antigen) can effectively treat a sialic acid-mediated disorder (e.g., cancer, e.g., a solid tumor) in vivo.

[0007] The invention further relates to recombinant forms of sialidase enzymes, sialidase enzymes conjugated to a serum half-life enhancer, and pharmaceutical compositions thereof, that have suitable substrate specificities and activities to be useful in removing sialic acid and/or sialic acid containing molecules from the surface of cancer cells and/or removing sialic acid and/or sialic acid containing molecules from the tumor microenvironment, and/or reducing the concentration of sialic acid and/or sialic acid containing molecules in the tumor microenvironment.

[0008] Thus, in certain aspects, the invention provides a pharmaceutical composition comprising or consisting essentially of a sialidase conjugated to a serum half-life enhancer that increases the serum half-life of the sialidase when administered to a subject.

[0009] In another aspect, the invention provides a method of treating a sialic acid-related disorder in a subject in need thereof. The method includes administering to the subject an effective amount of a pharmaceutical composition comprising or consisting essentially of a sialidase and a serum half-life enhancer that increases the serum half-life of the sialidase when administered to the subject, thereby to treat the disorder.

[0010] In certain embodiments, the sialidase is not conjugated to a cancer antigen targeting agent that binds a cancer antigen associated with a cancerous cell.

[0011] In certain embodiments, the sialidase is a functional fragment of a full-length sialidase or a variant that exhibits at least 50% of the activity of the full-length sialidase.

[0012] In certain embodiments, the sialidase and the serum half-life enhancer are covalently linked together in a fusion protein or are chemically conjugated together.

[0013] In certain embodiments, the serum half-life enhancer is selected from the group consisting of an Fc domain, transferrin, albumin, XTEN, a homo-amino acid polymer (HAP), a proline-alanine-serine polymer (PAS), an elastin-like peptide (ELP), albumin binding domain, CTP fusion, GLK fusion, and a polyethylene glycol.

[0014] In certain embodiments, the serum half-life enhancer is an Fc domain.

[0015] In certain embodiments, the serum half-life enhancer is not an Fc domain or polyethylene glycol.

[0016] In certain embodiments, the sialidase comprises one or more mutations relative to a template, wild-type sialidase.

[0017] In certain embodiments, the sialidase comprises a substitution or deletion of a methionine residue at a position corresponding to position 1 of wild-type human Neu2 (M1); a substitution of a valine residue at a position corresponding to position 6 of wild-type human Neu2 (V6); a substitution of an isoleucine residue at a position corresponding to position 187 of wild-type human Neu2 (I187); or a substitution of a cysteine residue at a position corresponding to position 332 of wild-type human Neu2 (C332); or a combination of any of the foregoing substitutions. In certain embodiments, in the sialidase, (a) the methionine residue at a position corresponding to position 1 of wild-type human Neu2 is deleted (ΔM1), is substituted by alanine (M1A), or is substituted by aspartic acid (M1D); (b) the valine residue at a position corresponding to position 6 of wild-type human Neu2 is substituted by tyrosine (V6Y); (c) the isoleucine residue at a position corresponding to position 187 of wild-type human Neu2 is substituted by lysine (I187K); (d) or the cysteine residue at a position corresponding to position 332 of wild-type human Neu2 is substituted by alanine (C332A); or the sialidase comprises a combination of any of the foregoing substitutions.

[0018] In certain embodiments, the sialidase comprises a substitution or deletion of a methionine residue at a position corresponding to position 1 of wild-type human Neu2 (M1); a substitution of a valine residue at a position corresponding to position 6 of wild-type human Neu2 (V6); a substitution of an proline residue at a position corresponding to position 62 of wild-type human Neu2 (P62); a substitution of an alanine residue at a position corresponding to position 93 of wild-type human Neu2 (A93); a substitution of an isoleucine residue at a position corresponding to position 187 of wild-type human Neu2 (I187); a substitution of a glutamine residue at a position corresponding to position 126 of wild-type human Neu2 (Q126); a substitution of an alanine residue at a position corresponding to position 242 of wild-type human Neu2 (A242); a substitution of a glutamine residue at a position corresponding to position 270 of wild-type human Neu2 (Q270); a substitution of a serine residue at a position corresponding to position 301 of wild-type human Neu2 (S301); a substitution of a tryptophan residue at a position corresponding to position 302 of wild-type human Neu2 (W302); a substitution of a cysteine residue at a position corresponding to position 332 of wild-type human Neu2 (C332); or a combination of any of the foregoing substitutions.

[0019] In certain embodiments, the sialidase comprises a combination of substitutions selected from the group consisting of:

[0020] (a) M1D, V6Y, P62G, A93E, I187K, C332A;

[0021] (b) M1D, V6Y, P62G, A93E, I187K, S301A, W302R, C332A;

[0022] (c) M1D, V6Y, P62G, A93E, Q126Y, I187K, A242F, Q270T, C332A;

[0023] (d) M1D, V6Y, P62G, A93E, Q126Y, I187K, C332A; and

[0024] (e) A93E, Q126Y, I187K, A242F, Q270T, C332A.

[0025] In certain embodiments, the sialidase conjugated to a serum half-life enhancer comprises an amino acid sequence selected from the group consisting of SEQ ID NOs: 115, 152, 180, 184, and 188, or an amino acid sequence that has at least 85%, 90%, 95%, 96%, 97%, 98%, or 99% to an amino acid sequence selected from the group consisting of SEQ ID NOs: 115, 152, 180, 184, and 188.

[0026] In certain embodiments, the sialidase comprises a substitution of a proline residue at a position corresponding to position 5 of wild-type human Neu2 (P5); a substitution of a lysine residue at a position corresponding to position 9 of wild-type human Neu2 (K9); a substitution of a lysine residue at a position corresponding to position 44 of wild-type human Neu2 (K44); a substitution of a lysine residue at a position corresponding to position 45 of wild-type human Neu2 (K45); a substitution of a leucine residue at a position corresponding to position 54 of wild-type human Neu2 (L54); a substitution of a proline residue at a position corresponding to position 62 of wild-type human Neu2 (P62); a substitution of a glutamine residue at a position corresponding to position 69 of wild-type human Neu2 (Q69); a substitution of an arginine residue at a position corresponding to position 78 of wild-type human Neu2 (R78); a substitution of an aspartic acid residue at a position corresponding to position 80 of wild-type human Neu2 (D80); a substitution of an alanine residue at a position corresponding to position 93 of wild-type human Neu2 (A93); a substitution of a glycine residue at a position corresponding to position 107 of wild-type human Neu2 (G107); a substitution of a glutamine residue at a position corresponding to position 108 of wild-type human Neu2 (Q108); a substitution of a glutamine residue at a position corresponding to position 112 of wild-type human Neu2 (Q112); a substitution of a cysteine residue at a position corresponding to position 125 of wild-type human Neu2 (C125); a substitution of a glutamine residue at a position corresponding to position 126 of wild-type human Neu2 (Q126); a substitution of an alanine residue at a position corresponding to position 150 of wild-type human Neu2 (A150); a substitution of a cysteine residue at a position corresponding to position 164 of wild-type human Neu2 (C164); a substitution of an arginine residue at a position corresponding to position 170 of wild-type human Neu2 (R170); a substitution of an alanine residue at a position corresponding to position 171 of wild-type human Neu2 (A171); a substitution of a glutamine residue at a position corresponding to position 188 of wild-type human Neu2 (Q188); a substitution of an arginine residue at a position corresponding to position 189 of wild-type human Neu2 (R189); a substitution of an alanine residue at a position corresponding to position 213 of wild-type human Neu2 (A213); a substitution of a leucine residue at a position corresponding to position 217 of wild-type human Neu2 (L217); a substitution of a glutamic acid residue at a position corresponding to position 225 of wild-type human Neu2 (E225); a substitution of a histidine residue at a position corresponding to position 239 of wild-type human Neu2 (H239); a substitution of a leucine residue at a position corresponding to position 240 of wild-type human Neu2 (L240); a substitution of an arginine residue at a position corresponding to position 241 of wild-type human Neu2 (R241); a substitution of an alanine residue at a position corresponding to position 242 of wild-type human Neu2 (A242); a substitution of a valine residue at a position corresponding to position 244 of wild-type human Neu2 (V244); a substitution of a threonine residue at a position corresponding to position 249 of wild-type human Neu2 (T249); a substitution of an aspartic acid residue at a position corresponding to position 251 of wild-type human Neu2 (D251); a substitution of a glutamic acid residue at a position corresponding to position 257 of wild-type human Neu2 (E257); a substitution of a serine residue at a position corresponding to position 258 of wild-type human Neu2 (S258); a substitution of a leucine residue at a position corresponding to position 260 of wild-type human Neu2 (L260); a substitution of a valine residue at a position corresponding to position 265 of wild-type human Neu2 (V265); a substitution of a glutamine residue at a position corresponding to position 270 of wild-type human Neu2 (Q270); a substitution of a tryptophan residue at a position corresponding to position 292 of wild-type human Neu2 (W292); a substitution of a serine residue at a position corresponding to position 301 of wild-type human Neu2 (S301); a substitution of a tryptophan residue at a position corresponding to position 302 of wild-type human Neu2 (W302); a substitution of a cysteine residue at a position corresponding to position 332 of wild-type human Neu2 (C332); a substitution of a valine residue at a position corresponding to position 363 of wild-type human Neu2 (V363); or a substitution of a leucine residue at a position corresponding to position 365 of wild-type human Neu2 (L365); or a combination of any of the foregoing substitutions.

[0027] In certain embodiments, the sialidase is selected from the group consisting of a bacterial sialidase, a viral sialidase, and a mammalian sialidase. In certain embodiments, the sialidase is a human sialidase. In certain embodiments, the human sialidase is selected from the group consisting of neu1, neu2, neu3, and neu4. In certain embodiments, the human sialidase is neu2.

[0028] In certain embodiments, the pharmaceutical comprises from about 0.01 mg/kg to about 100 mg/kg of the sialidase.

[0029] In certain embodiments, the pharmaceutical composition comprises a second therapeutic agent. In certain embodiments, the second therapeutic agent is selected from the group consisting of an anti-inflammatory agent, anti-angiogenic agent, anti-fibrotic agent, or an anti-proliferative compound (e.g., a cytotoxic agent or a checkpoint inhibitor).

[0030] In certain embodiments, the pharmaceutical composition further comprises a stabilizing amount of a sialidase stabilizing agent. In certain embodiments, the sialidase stabilizing agent is a cation. In certain embodiments, the cation is selected from the group consisting of calcium and magnesium.

[0031] In certain embodiments, the pharmaceutical composition is disposed in a sterile container (e.g., bottle or vial). In certain embodiments, the pharmaceutical composition is lyophilized in the sterile container. In certain embodiments, the pharmaceutical composition is present as a solution in the sterile container. In certain embodiments, sterile container is sealed with a septum. In certain embodiments, sterile container has a label disposed thereon identifying the pharmaceutical composition contained in the container.

[0032] In another aspect, the disclosure relates to a method of treating a sialic acid-related disorder in a subject in need thereof, the method comprising administering to the subject a pharmaceutical composition comprising an effective amount of a sialidase and a serum half-life enhancer that increases the serum half-life of the sialidase when administered to a subject, thereby to treat the disorder.

[0033] In certain embodiments, the sialic acid-related disorder is cancer. In certain embodiments, the sialidase is not conjugated to a cancer antigen targeting agent that binds a cancer antigen associated with a cancerous cell.

[0034] In certain embodiments, the sialidase is a functional fragment of a full-length sialidase that exhibits at least 50% of the activity of the full-length sialidase. In certain embodiments, the sialidase is a variant that exhibits at least 50% of the activity of the wild-type sialidase.

[0035] In certain embodiments, the sialidase and the serum half-life enhancer are covalently linked together in a fusion protein. In certain embodiments, the sialidase and serum half-life enhancer are chemically conjugated together.

[0036] In certain embodiments, the serum half-life enhancer is selected from the group consisting of an Fc domain, transferrin, albumin, XTEN, a homo-amino acid polymer (HAP), a proline-alanine-serine polymer (PAS), an elastin-like peptide (ELP), and a polyethylene glycol. In certain embodiments, the serum half-life enhancer is an Fc domain. In certain embodiments, the serum half-life enhancer is not an Fc domain or polyethylene glycol.

[0037] In certain embodiments, the sialidase comprises one or more mutations relative to a template, wild-type sialidase. In certain embodiments, the sialidase comprises a substitution or deletion of a methionine residue at a position corresponding to position 1 of wild-type human Neu2 (M1); a substitution of a valine residue at a position corresponding to position 6 of wild-type human Neu2 (V6); a substitution of an isoleucine residue at a position corresponding to position 187 of wild-type human Neu2 (I187); or a substitution of a cysteine residue at a position corresponding to position 332 of wild-type human Neu2 (C332); or a combination of any of the foregoing substitutions.

[0038] In certain embodiments, in the sialidase, the methionine residue at a position corresponding to position 1 of wild-type human Neu2 is deleted (ΔM1), is substituted by alanine (M1A), or is substituted by aspartic acid (M1D); the valine residue at a position corresponding to position 6 of wild-type human Neu2 is substituted by tyrosine (V6Y); the isoleucine residue at a position corresponding to position 187 of wild-type human Neu2 is substituted by lysine (I187K); or the cysteine residue at a position corresponding to position 332 of wild-type human Neu2 is substituted by alanine (C332A); or the sialidase comprises a combination of any of the foregoing substitutions.

[0039] In certain embodiments, the sialidase comprises a substitution or deletion of a methionine residue at a position corresponding to position 1 of wild-type human Neu2 (M1); a substitution of a valine residue at a position corresponding to position 6 of wild-type human Neu2 (V6); a substitution of an proline residue at a position corresponding to position 62 of wild-type human Neu2 (P62); a substitution of an alanine residue at a position corresponding to position 93 of wild-type human Neu2 (A93); a substitution of an isoleucine residue at a position corresponding to position 187 of wild-type human Neu2 (I187); a substitution of a glutamine residue at a position corresponding to position 126 of wild-type human Neu2 (Q126); a substitution of an alanine residue at a position corresponding to position 242 of wild-type human Neu2 (A242); a substitution of a glutamine residue at a position corresponding to position 270 of wild-type human Neu2 (Q270); a substitution of a serine residue at a position corresponding to position 301 of wild-type human Neu2 (S301); a substitution of a tryptophan residue at a position corresponding to position 302 of wild-type human Neu2 (W302); a substitution of a cysteine residue at a position corresponding to position 332 of wild-type human Neu2 (C332); or a combination of any of the foregoing substitutions.

[0040] In certain embodiments, the sialidase comprises a combination of substitutions selected from the group consisting of:

[0041] (a) M1D, V6Y, P62G, A93E, I187K, C332A;

[0042] (b) M1D, V6Y, P62G, A93E, I187K, S301A, W302R, C332A;

[0043] (c) M1D, V6Y, P62G, A93E, Q126Y, I187K, A242F, Q270T, C332A;

[0044] (d) M1D, V6Y, P62G, A93E, Q126Y, I187K, C332A; and

[0045] (e) A93E, Q126Y, I187K, A242F, Q270T, C332A.

[0046] In certain embodiments, the sialidase conjugated to a serum half-life enhancer comprises an amino acid sequence selected from the group consisting of SEQ ID NOs: 115, 152, 180, 184, and 188, or an amino acid sequence that has at least 85%, 90%, 95%, 96%, 97%, 98%, or 99% to an amino acid sequence selected from the group consisting of SEQ ID NOs: 115, 152, 180, 184, and 188.

[0047] In certain embodiments, the sialidase comprises a substitution of a proline residue at a position corresponding to position 5 of wild-type human Neu2 (P5); a substitution of a lysine residue at a position corresponding to position 9 of wild-type human Neu2 (K9); a substitution of a lysine residue at a position corresponding to position 44 of wild-type human Neu2 (K44); a substitution of a lysine residue at a position corresponding to position 45 of wild-type human Neu2 (K45); a substitution of a leucine residue at a position corresponding to position 54 of wild-type human Neu2 (L54); a substitution of a proline residue at a position corresponding to position 62 of wild-type human Neu2 (P62); a substitution of a glutamine residue at a position corresponding to position 69 of wild-type human Neu2 (Q69); a substitution of an arginine residue at a position corresponding to position 78 of wild-type human Neu2 (R78); a substitution of an aspartic acid residue at a position corresponding to position 80 of wild-type human Neu2 (D80); a substitution of an alanine residue at a position corresponding to position 93 of wild-type human Neu2 (A93); a substitution of a glycine residue at a position corresponding to position 107 of wild-type human Neu2 (G107); a substitution of a glutamine residue at a position corresponding to position 108 of wild-type human Neu2 (Q108); a substitution of a glutamine residue at a position corresponding to position 112 of wild-type human Neu2 (Q112); a substitution of a cysteine residue at a position corresponding to position 125 of wild-type human Neu2 (C125); a substitution of a glutamine residue at a position corresponding to position 126 of wild-type human Neu2 (Q126); a substitution of an alanine residue at a position corresponding to position 150 of wild-type human Neu2 (A150); a substitution of a cysteine residue at a position corresponding to position 164 of wild-type human Neu2 (C164); a substitution of an arginine residue at a position corresponding to position 170 of wild-type human Neu2 (R170); a substitution of an alanine residue at a position corresponding to position 171 of wild-type human Neu2 (A171); a substitution of a glutamine residue at a position corresponding to position 188 of wild-type human Neu2 (Q188); a substitution of an arginine residue at a position corresponding to position 189 of wild-type human Neu2 (R189); a substitution of an alanine residue at a position corresponding to position 213 of wild-type human Neu2 (A213); a substitution of a leucine residue at a position corresponding to position 217 of wild-type human Neu2 (L217); a substitution of a glutamic acid residue at a position corresponding to position 225 of wild-type human Neu2 (E225); a substitution of a histidine residue at a position corresponding to position 239 of wild-type human Neu2 (H239); a substitution of a leucine residue at a position corresponding to position 240 of wild-type human Neu2 (L240); a substitution of an arginine residue at a position corresponding to position 241 of wild-type human Neu2 (R241); a substitution of an alanine residue at a position corresponding to position 242 of wild-type human Neu2 (A242); a substitution of a valine residue at a position corresponding to position 244 of wild-type human Neu2 (V244); a substitution of a threonine residue at a position corresponding to position 249 of wild-type human Neu2 (T249); a substitution of an aspartic acid residue at a position corresponding to position 251 of wild-type human Neu2 (D251); a substitution of a glutamic acid residue at a position corresponding to position 257 of wild-type human Neu2 (E257); a substitution of a serine residue at a position corresponding to position 258 of wild-type human Neu2 (S258); a substitution of a leucine residue at a position corresponding to position 260 of wild-type human Neu2 (L260); a substitution of a valine residue at a position corresponding to position 265 of wild-type human Neu2 (V265); a substitution of a glutamine residue at a position corresponding to position 270 of wild-type human Neu2 (Q270); a substitution of a tryptophan residue at a position corresponding to position 292 of wild-type human Neu2 (W292); a substitution of a serine residue at a position corresponding to position 301 of wild-type human Neu2 (S301); a substitution of a tryptophan residue at a position corresponding to position 302 of wild-type human Neu2 (W302); a substitution of a cysteine residue at a position corresponding to position 332 of wild-type human Neu2 (C332); a substitution of a valine residue at a position corresponding to position 363 of wild-type human Neu2 (V363); or a substitution of a leucine residue at a position corresponding to position 365 of wild-type human Neu2 (L365); or a combination of any of the foregoing substitutions.

[0048] In certain embodiments, the sialidase is selected from the group consisting of a bacterial sialidase, a viral sialidase, and a mammalian sialidase. In certain embodiments, the mammalian sialidase is a human sialidase. In certain embodiments, the human sialidase is selected from the group consisting of neu1, neu2, neu3, and neu4. In certain embodiments, the human sialidase is neu2.

[0049] In certain embodiments, from about 0.01 mg/kg to about 100 mg/kg of the sialidase is administered to the subject.

[0050] In certain embodiments, the cancer is a solid tumor, soft tissue tumor, hematopoietic tumor or metastatic lesion. In certain embodiments, the solid tumor is a sarcoma, adenocarcinoma, or carcinoma. In certain embodiments, the solid tumor is a head and neck (e.g., pharynx), thyroid, lung (e.g., small cell or non-small cell lung carcinoma (NSCLC)), breast, lymphoid, gastrointestinal (e.g., oral, esophageal, stomach, liver, pancreas, small intestine, colon and rectum, anal canal), genital or genitourinary tract (e.g., renal, urothelial, bladder, ovarian, uterine, cervical, endometrial, prostate, testicular), CNS (e.g., neural or glial cell, e.g., neuroblastoma or glioma), or skin (e.g., melanoma) tumor. In certain embodiments, the cancer is breast cancer.

[0051] In certain embodiments, the hematopoietic tumor is a leukemia, acute leukemia, acute lymphoblastic leukemia (ALL), B-cell, T-cell or FAB ALL, acute myeloid leukemia (AML), chronic myelocytic leukemia (CML), chronic lymphocytic leukemia (CLL), e.g., transformed CLL, diffuse large B-cell lymphoma (DLBCL), follicular lymphoma, hairy cell leukemia, myelodyplastic syndrome (MDS), lymphoma, Hodgkin's disease, malignant lymphoma, non-Hodgkin's lymphoma, Burkitt's lymphoma, multiple myeloma, or Richter's Syndrome (Richter's Transformation). In certain embodiments, the cancer is lymphoma.

[0052] In certain embodiments, administration of the pharmaceutical composition increases expression of granzyme B, IFNγ, IL-10, IL-6, or IL-17A in the subject.

[0053] In certain embodiments, the pharmaceutical composition is administered to the subject in combination with another therapeutic agent. In certain embodiments, the therapeutic agent is selected from the group consisting of an anti-inflammatory agent, anti-angiogenic agent, anti-fibrotic agent, or an anti-proliferative compound (e.g., a cytotoxic agent or a checkpoint inhibitor).

[0054] In certain embodiments, the pharmaceutical composition further comprises a stabilizing amount of a sialidase stabilizing agent. In certain embodiments, the sialidase stabilizing agent is a cation. In certain embodiments, the cation is selected from the group consisting of calcium and magnesium.

[0055] In certain embodiments, the pharmaceutical composition, prior to administration, is disposed in a sterile container (e.g., bottle or vial).

[0056] In certain embodiments, the method comprises administering an effective amount of the pharmaceutical composition to the subject.

[0057] In certain embodiments, the disclosure relates to a method of removing sialic acid from a cell in a subject, the method comprising administering to the subject an effective amount of the pharmaceutical composition thereby to remove sialic acid from the cell.

[0058] In certain embodiments, the cell is a tumor cell, dendritic cell (DC) or monocyte. In certain embodiments, the cell is a monocyte, and the method results in increased expression of an MHC-II molecule on the monocyte.

[0059] In certain embodiments, the disclosure relates to a method of increasing phagocytosis of a tumor cell in a subject, the method comprising administering to the subject an effective amount of the pharmaceutical composition in an amount effective to remove sialic acid from the tumor cell, thereby increasing phagocytosis of the tumor cell.

[0060] In certain embodiments, the disclosure relates to a method of activating a dendritic cell (DC) in a subject, the method comprising administering to the subject an amount of the pharmaceutical composition effective to remove sialic acid from a tumor cell in the subject, thereby to activate the DC in the subject.

[0061] In certain embodiments, the disclosure relates to a method of reducing Siglec-15 binding activity, thereby increasing anti-tumor activity in a tumor microenvironment of a patient, the method comprising administering to the subject an effective amount of the pharmaceutical composition, thereby increasing anti-tumor activity (e.g., T cell activity) in the subject.

[0062] In another aspect, the invention provides a method of expressing a recombinant sialidase. The method can include (a) providing a cell comprising a nucleic acid encoding the recombinant sialidase and (b) expressing the recombinant sialidase in the presence of a stabilizing agent. In certain embodiments, the method further includes purifying the recombinant sialidase produced in step (b). The purification can be performed in the presence of a stabilizing agent, such as a cation (e.g., calcium or magnesium).

[0063] These and other aspects and features of the invention are described in the following detailed description and claims.

### DESCRIPTION OF THE DRAWINGS

[0064] The invention can be more completely understood with reference to the following drawings.

[0065] FIG. 1 depicts different configurations for sialidase-Fc fusion constructs. Sialidase-Fc fusion constructs can comprise a first polypeptide comprising a first immunoglobulin Fc domain (“Fc domain”), and a second polypeptide comprising a second immunoglobulin Fc domain. The first and second polypeptides can be covalently linked together, e.g., by disulfide bond(s). FIG. 1A shows a construct having two Fc domains and a sialidase enzyme conjugated to the N-terminus of each Fc domain. FIG. 1B shows a construct having two Fc domains and a sialidase enzyme conjugated to the C-terminus of the first Fc domain and the N-terminus of the second Fc domain. FIG. 1C shows a construct having two Fc domains and a sialidase enzyme conjugated to the N-terminus of the second Fc domain. FIG. 1D shows a construct having two Fc domains and a sialidase enzyme conjugated to the C-terminus of the first Fc domain. FIG. 1E shows a construct having two Fc domains and a sialidase enzyme conjugated to the C-terminus of the each Fc domain. It is understood that the Fc domains can be naturally occurring Fc domains or engineered Fc domains containing modifications, such as, point mutations in each polypeptide chain that facilitates a knob into hole configuration, or to provide a modified Fc domain functionality.

[0066] FIG. 2 depicts an SDS-PAGE gel showing recombinant human Neu1, Neu2, Neu3, and Salmonella typhimurium (ST-sialidase) under non-reducing and reducing conditions. Monomer and dimer species are indicated.

[0067] FIG. 3 is a bar graph showing the enzymatic activity of recombinant human Neu1, Neu2, and Neu3.

[0068] FIG. 4 is a line graph showing enzymatic activity as a function of substrate concentration for recombinant human Neu2 and Neu3 at the indicated pH.

[0069] FIG. 5A depicts an SDS-PAGE gel showing recombinant wildtype human Neu2-Fc and the Neu2-Fc variant M106 (“M106”) under non-reducing and reducing conditions.

[0070] FIGS. 5B and 5C show SEC-HPLC traces comparing wildtype Neu2-Fc versus M106, wherein the monomer species has a retention time of 21 minutes.

[0071] FIG. 6 is a line graph showing the enzymatic activity as a function of substrate concentration for M106.

[0072] FIG. 7 is a bar graph showing the enzymatic activity of Neu3-Fc in the supernatant (“Supernatant”) or membrane-bound (“Washed Cells”) Expi293 cells.

[0073] FIG. 8 is an SEC-HPLC trace of Fc-ST Sialidase, wherein the monomer species has a retention time of 21 minutes.

[0074] FIGS. 9A-D are a series of line graphs showing tumor volume in a mouse A20 (lymphoma) syngeneic tumor model. Mice were administered a negative control (“Isotype Control,” FIG. 9A), Fc-ST Sialidase (FIG. 9B), Avelumab (anti-mouse PD-L1 antibody, FIG. 9C), or the combination of Fc-ST Sialidase and Avelumab (FIG. 9D) at 10 mg/kg twice a week for 15 days and tumor volume was measured over time. Administration of FC-ST Sialidase alone or in combination with Avelumab reduces tumor volume.

[0075] FIGS. 10A-D is a series of line graphs showing tumor volume in a mouse syngeneic tumor model utilizing EMT6 cells engineered for human Her2 expression. Mice were administered isotype control (Vehicle Control, FIG. 10A), Fc-ST Sialidase (FC-ST, FIG. 10B), trastuzumab (anti human Her2 antibody, FIG. 10C), or Fc human Sialidase (M106, FIG. 10D) for at 10 mg/kg twice a week for 15 days, as indicated by the triangles, and tumor volume was measured over time. Administration of Fc human Sialidase or Fc-ST Sialidase reduces tumor volume.

[0076] FIG. 11 is a bar graph showing that neuraminidase activity following incubation at 37° C. for up to 14 days is stabilized by the addition of CaCl₂.

[0077] FIG. 12A is a bar graph showing neuraminidase activity in conditioned media of cells expressing a human neuraminidase Fc construct at the indicated days following transfection in the presence or absence of 4 mM CaCl₂. As shown, the presence of CaCl₂ stabilizes activity. FIG. 12B is a bar graph depicting cell viability at the indicated days following transfection in the presence or absence of 4 mM CaCl₂.

[0078] FIG. 13A is a bar graph showing that neuraminidase activity is stabilized by CaCl₂ at different concentrations in conditioned media of cells expressing a human neuraminidase Fc construct. Enzyme activity at the indicated days following transfection in the presence of 0, 0.05, 0.5, 1, 2 and 4 mM CaCl₂ is shown. FIG. 13B shows total protein yield at day 6 in the presence of 0, 0.05, 0.5, 1, 2 and 4 mM CaCl₂.

[0079] FIG. 14 provides bar graphs depicting geometric mean fluorescence intensity (gMFIs) resulting from staining with Hydra-3 (FIG. 14A), Hydra-7 (FIG. 14B), and Hydra-9 (FIG. 14C) of different immune subset populations.

[0080] FIG. 15 provides bar graphs depicting geometric mean fluorescence intensity (gMFIs) resulting from staining with PNA (FIG. 15A), MAL-II (FIG. 15B), and SNA (FIG. 15C) of different immune subset populations.

[0081] FIG. 16 provides line graphs depicting the degree of desialylation of dendritic cells (DCs) by increasing concentrations of M106. FIG. 16A depicts mean fluorescence intensity (MFI) and FIG. 16B provides bar graphs depicting fold increase in desialylation compared to untreated DCs.

[0082] FIG. 17 provides line graphs the degree of desialylation of BT-20 (breast cancer) tumor cells following treatment with increasing concentrations of M106 (triangles) compared to LOF control (squares) as determined by Hydra 9 binding (FIG. 17A) or PNA binding (FIG. 17B), measured by gMFI.

[0083] FIG. 18 provides line graphs depicting the degree of desialylation of HT-29 tumor cells following treatment with increasing concentrations of M106 (triangles) compared to LOF control (squares) as determined by Hydra 9 binding (FIG. 18A) or PNA binding (FIG. 18B) and measured as gMFI.

[0084] FIG. 19 provides line graphs depicting the degree of desialylation of SK-BR-3 tumor cells following treatment with increasing concentrations of M106 (triangles) compared to LOF control (squares) as determined by Hydra 9 binding (FIG. 19A), MAL-II binding (FIG. 19B) or PNA binding (FIG. 19C) and measured as gMFI.

[0085] FIG. 20 provides bar graphs depicting the percent increase in CD83hi expression (FIG. 20A) and CD86hi expression (FIG. 20B) on DCs following incubation with SKBR3 tumor cells treated with or without M106 in the presence or absence of lipopolysaccharide (LPS) treatment (open bars versus filled bars).

[0086] FIG. 21 depicts the dose-dependent enhancement of phagocytosis by M2-like macrophages of HT-29 tumor cells that were desialylated by M106 or LOF, as indicated. Tumor cells were derived from two different healthy donors (FIG. 21A and FIG. 21B). A similar increase in phagocytosis of desialylated BT20 and SKBR-3 tumor cells by M2 like macrophages is depicted in FIG. 21C and FIG. 21D respectively.

[0087] FIG. 22 provides bar graphs depicting the dose-dependent enhancement of HLA-DR expression following desialylation of monocytes by M106 or LOF control. Monocytes were obtained from two different healthy donors (FIG. 22A and FIG. 22B).

[0088] FIG. 23 provides tumor growth curves depicting the in vivo activity of sialidases of the current disclosure in a mouse MC38 syngeneic tumor model. Tumor growth curves for individual mice are shown for isotype control treated mice (FIG. 23A), M106-treated mice (FIG. 23B), anti-PD-1 treated mice (FIG. 23C) or mice treated with a combination of M106 and anti-PD-1 (FIG. 23D). Triangles indicate administration times of test articles.

[0089] FIG. 24 provides tumor growth curves depicting the in vivo activity of sialidases of the current invention in a mouse B16F10 syngeneic tumor model. Tumor growth curves for individual mice are shown for isotype control treated mice (FIG. 24A), M106 treated mice (FIG. 24B) or anti-PD-1 treated mice (FIG. 24C). FIG. 24D is an overlay of the tumor growth curves for isotype control group and the M106 group. Triangles indicate administration times of test articles.

[0090] FIG. 25 provides tumor growth curves depicting the in vivo activity of sialidases of the current invention in a mouse EMT6 syngeneic tumor model. Tumor growth curves for each individual mouse is shown for Isotype control treated mice (FIG. 25A) or M106 treated mice (FIG. 25B). Triangles indicate administration times of test articles.

[0091] FIG. 26 depicts the in vivo efficacy of M106 alone or in combination with avelumab (“Ave”) at the indicated dose in a mouse A20 syngeneic subcutaneous tumor model. Tumor growth curves for each mouse are depicted. Observed partial responses (PR) and complete responses (CR) are also indicated.

[0092] FIG. 27 depicts the in vivo efficacy of M106 alone or in combination with avelumab at the indicated dose in a mouse A20 syngeneic subcutaneous tumor model. Tumor growth curves for each mouse are depicted. Triangles indicate dosing.

[0093] FIG. 28 depicts the in vivo activity of ofatumumab, a combination of ofatumumab and Neu2-M106-Fc (“M106 FC”), and an isotype control in a syngeneic EL4-CD20 lymphoma intravenous dissemination model as of day 28 (FIG. 28A) or at the end of in-life as of day 41 (FIG. 28B). Triangles indicate dosing of various test articles. P-value was calculated by Log-rank (Mantle-Cox) test.

[0094] FIG. 29 depicts the results of Siglec-15-Fc staining of CD4+ cells (FIG. 29A) and CD8+ cells (FIG. 29B) following no treatment (“none”), treatment with a loss of function sialidase (“LOF FC”), or treatment with a sialidase (M106 (“M106 FC”) or BiNaNH2 (positive control)). As a negative control, Isotype IgG1 staining is also shown. As shown, treatment of activated CD4 and CD8 cells with M106 or BiNaNH2 decreased Siglec-15-Fc staining as compared to no treatment or treatment with a loss of function sialidase. Bar graphs showing levels of fluorescence (gMFI) and the underlying flow cytometry histogram data are provided in each figure.

[0095] FIG. 30 depicts the results of Siglec-15-Fc staining of CD4+ cells (FIG. 30A) and CD8+ cells (FIG. 30B) using the same methods as in FIG. 30A-B, with PBMCs from a second healthy donor.

### DETAILED DESCRIPTION

[0096] The invention is based, in part, upon the discovery that it is possible to treat a sialic acid-mediated disorder by administering a sialidase enzyme or a sialidase enzyme conjugated to a serum half-life enhancer. Surprisingly, it has been discovered that a sialidase or a sialidase enzyme conjugated to a serum half-life enhancer that lacks a targeting moiety (e.g., an antibody binding domain directed to a tumor antigen) can effectively treat a sialic acid-mediated disorder (e.g., cancer, e.g., a solid tumor) in vivo. As a result, the constructs described herein can be used on their own to treat a sialic acid-medicated disorder, e.g., cancer, or they can be used in combination with another agent, e.g., an anti-cancer agent, to treat the disorder, e.g., cancer. For example, when used in combination with another anti-cancer agent, the constructs can enhance the activity of the anti-cancer agent, for example, by making the cancer more susceptible to treatment with the anti-cancer agent.

[0097] The invention further relates to recombinant forms of sialidase enzymes, sialidase enzymes conjugated to a serum half-life enhancer, and pharmaceutical compositions thereof, that have suitable substrate specificities and activities to be useful in removing sialic acid and/or sialic acid containing molecules from the surface of cancer cells and/or removing sialic acid and/or sialic acid containing molecules from the tumor microenvironment, and/or reducing the concentration of sialic acid and/or sialic acid containing molecules in the tumor microenvironment.

[0098] The invention further relates to pharmaceutical compositions and methods of using sialidase or sialidase conjugated to a half-life extender to treat cancer, e.g., a solid tumor, soft tissue tumor, hematopoietic tumor, metastatic lesion, or an epithelial cell cancer.

[0099] Various features and aspects of the invention are discussed in more detail below.

### I. Recombinant Sialidases

[0100] As used herein, the term “sialidase” refers to any enzyme, or a functional fragment or variant thereof, that cleaves a terminal sialic acid residue from a substrate, for example, a glycoprotein or a glycolipid. The term sialidase includes variants having one or more amino acid substitutions, deletions, or insertions relative to a wild-type sialidase sequence, and/or fusion proteins or conjugates including a sialidase. Sialidases are also called neuraminidases, and, unless indicated otherwise, the two terms are used interchangeably herein. As used herein, the term “functional fragment” of a sialidase refers to fragment of a full-length sialidase that retains, for example, at least 10%, at least 20%, at least 30%, at least 40%, at least 50%, at least 60%, at least 70%, at least 80%, at least 90%, at least 95%, or 100% of the enzymatic activity of the corresponding full-length, naturally occurring sialidase. Sialidase enzymatic activity may be assayed by any method known in the art, including, for example, by measuring the release of sialic acid from the fluorogenic substrate 4-methylumbelliferyl-N-acetylneuraminic acid (4MU-NeuAc). In certain embodiments, the functional fragment comprises at least 100, 150, 200, 250, 300, 310, 320, 330, 340, 350, 360, or 370 consecutive amino acids present in a full-length, naturally occurring sialidase.

[0101] The sialidase described herein can be any sialidase, e.g., a viral, fungal, bacterial, non-human mammalian or human sialidase. In certain embodiments, the sialidase is a recombinant human sialidase comprising at least one mutation relative to a wild-type human sialidase, e.g., a substitution, deletion, or addition of at least one amino acid, as described above.

[0102] In certain embodiments, the sialidase is any recombinant mutant human sialidase disclosed herein, or a functional fragment thereof.

[0103] In certain embodiments, the sialidase comprises a C332A and C352L mutation. In certain embodiments, the sialidase comprises an N-terminal addition of MEDLRP (SEQ ID NO: 4) or EDLRP (SEQ ID NO: 3). In certain embodiments, the sialidase comprises a LSHSLST (SEQ ID NO: 22) peptide on the N-terminus. In certain embodiments, the sialidase comprises an N-terminal addition of MEDLRP (SEQ ID NO: 4) and an A2K substitution. In certain embodiments, the sialidase comprises an N-terminal addition of MEDLRP (SEQ ID NO: 4) and a C332A substitution. In certain embodiments, the sialidase comprises an N-terminal addition of MEDLRP (SEQ ID NO: 4), a C332A substitution, and a C352L substitution.

[0104] In certain embodiments, the sialidase portion comprises an M1 deletion (ΔM1), M1A substitution, M1D substitution, V6Y substitution, K9D substitution, P62G substitution, P62N substitution, P62S substitution, P62T substitution, A93E substitution, Q126Y substitution, I187K substitution, A242T substitution, Q270A substitution, Q270T substitution, S301R substitution, S301R substitution, W302K substitution, W302R substitution, C332A substitution, V363R substitution, L365I substitution, or a combination of any of the foregoing.

[0105] In certain embodiments, the sialidase comprises the amino acid sequence of any one of SEQ ID NOs: 48-62, 169-171, or 196, or an amino acid sequence that has at least 85%, 90%, 95%, 96%, 97%, 98%, or 99% sequence identity to any one of 48-62, 169-171, or 196.

[0106] a. Viral Sialidases

[0107] Exemplary viral sialidases include Influenza A virus surface glycoprotein neuraminidase (e.g., NCBI accession no. ACY01419.1, SEQ ID NO: 63), Influenza B virus surface glycoprotein neuraminidase (e.g., NCBI accession no. AIX94926.1, SEQ ID NO: 64), or an Influenza C virus surface glycoprotein neuraminidase, or a variant or functional fragment thereof. Other exemplary viral sialidases include Paramyxoviridae Respirovirus Parainfluenzavirus type 1 & 3 (e.g., NCBI accession no. BAD89145.1, SEQ ID NO: 65), Bovine Parainfluenza virus type 3 (e.g., NCBI accession no. ADQ43755, SEQ ID NO: 66), Sendai virus (e.g., UniProtKB accession P04853.1, SEQ ID NO: 67), Rubulavirus, Mumps virus, Simian virus 5, and Parainfluenza virus type 2 & 4a, 4b.

[0108] b. Prokaryotic Sialidases

[0109] Exemplary prokaryotic sialidases include sialidases from Salmonella typhimurium and Vibrio cholera. The amino acid sequence of Salmonella typhimurium sialidase (St-sialidase) is depicted in SEQ ID NO: 30, and a nucleotide sequence encoding Salmonella typhimurium sialidase is depicted in SEQ ID NO: 6. The amino acid sequence of Vibrio cholera sialidase is depicted in SEQ ID NO: 36, and a nucleotide sequence encoding Vibrio cholera sialidase is depicted in SEQ ID NO: 37.

[0110] Other exemplary prokaryotic sialidases include sialidases from Actinomyces viscosus (Avis_NanH; Uniprot accession no. AAA21932, SEQ ID NO:68); Arthrobacter nicotianae NA1 and NA2; sialidases from Arthrobacter sialophilus; Arthrobacter ureafaciens L, M1, M2 and S (GenBank accession no. BAD66680, SEQ ID NO:69); sialidases from Bacteroides fragilis; sialidases from Clostridium chauvoei; i A99 NanH (GenBank accession no. CAA50436, SEQ ID NO:70), NanI (GenBank accession no. ABG83208, SEQ ID NO:71), NanJ (GenBank accession no. ABG84247, SEQ ID NO:72); sialidases from Clostridium septicum (e.g., GenBank accession no. CAA44916.1, SEQ ID NO: 107); sialidases from Clostridium sordellii; sialidases from Clostridium tertium (e.g., GenBank accession no. CAA69951, SEQ ID NO: 73); sialidases from Corynebacterium diphtheriae (e.g., GenBank accession no. ACS34893, SEQ ID NO: 74); sialidases from Haemophilus parasuis; sialidases from Micromonospora viridifaciens (e.g., GenBank accession no. BAA00852, SEQ ID NO: 75); Pasteurella multocida NanH (GenBank accession no. AAG35310.1, SEQ ID NO: 76) and NanB (AAG35309, SEQ ID NO: 77); sialidases from Pseudomonas Aeruginosa (e.g., GenBank accession no. AAG06182, SEQ ID NO: 78); sialidases from Salmonella Typhimurium (e.g., GenBank accession no. NP 459905, SEQ ID NO: 79); Streptococcus pneumoniae NanA (GenBank accession no. P62575, SEQ ID NO: 108), NanB (GenBank accession no. AAC44396, SEQ ID NO: 80) and NanC; sialidases from Tannerella forsythia (e.g., GenBank accession no. TF0035, SEQ ID NO: 81; sialidases from Vibrio cholerae (e.g., GenBank accession no. YP_001217324, SEQ ID NO: 82), sialidases from C. diphtheriae (C. diphtheriae KCTC3075 NanH, designated as Cdip_NanH (GenBank accession number ACS34893, SEQ ID NO: 83) and its homologues; Corynebacterium glutamicum R hypothetical protein (Cglu_hypP; YP_001138502, SEQ ID NO: 84); C. perfringens NCTC 8239 sialidase I (Cper_NanI; ZP_02643014, SEQ ID NO: 85); B. fragilis YCH46 sialidase (Bfra_NanH; Uniprot accession no. BAA05853, SEQ ID NO:86); M. viridifaciens sialidase (Mvir_NanH; Uniprot accession no. BAA0085, SEQ ID NO: 87); S. pneumoniae NanA sialidase (Spne_NanA; P62575, SEQ ID NO: 88); Streptomyces coelicolor A3(2) sialidase (Scoe_NanH; NP_630638, SEQ ID NO: 89); Streptomyces griseus NBRC 13350 sialidase (Sgri_NanH; YP_001827941, SEQ ID NO: 90); Propionibacterium acnes SK137 sialidase (Pacn_NanH; ZP_03389398, SEQ ID NO: 91); Macrobdella decora trans-sialidase (Mdec_NanL; AAC47263, SEQ ID NO: 92); T. cruzi trans-sialidase (Tcru_TS; GenBank accession no. AAA99442, SEQ ID NO:93); Akkermansia muciniphila (ATCC BAA-835/DSM 22959) Amuc_0625/Am0707 (Uniprot accession no. B2UPI5, SEQ ID NO: 94); B. fragilis TAL2480 YCH46 sialidase (GenBank accession no. BF1729, SEQ ID NO: 95) (P31206); B. fragilis SBT3182; B. fragilis 4852; B. fragilis YM4000; B. thetaiotaomicron VPI-5482 sialidase (BtsA;BTSA;BT0455) (GenBank accession no. Q8AAK9, SEQ ID NO: 96); B. vulgatus ATCC 8482/DSM 1447/NCTC 11154 BVU 4143 (Uniprot accession no. A6L7T1, SEQ ID NO:97); B. bifidum JCM 1254 exo-α-sialidase (SiaBb2;BBP 0054) (GenBank accession no. BAK26854.1, SEQ ID NO: 98); C. perfringens A99 sialidase 1 ‘small’ (P10481, SEQ ID NO: 99); C. perfringens ATCC 10543 sialidase 2 (NanH) (Uniprot accession no. Q59311, SEQ ID NO: 100); C. perfringens ATCC 13124 sialidase (CPF 0721) (Uniprot accession no. QOTT67, SEQ ID NO: 101); C. perfringens str 13 exo-α-sialidase (NanI;CPSA;CPE0725) (Uniprot accession no. Q8XMG4, SEQ ID NO: 102); C. perfringens str 13/ATCC 13124 exo-α-sialidase (NanJ;CPE0553 (Uniprot accession no. Q8XMY5, SEQ ID NO: 103); Clostridium tertium ATCC 14573 sialidase (NanH;SiaH) (Uniprot accession no. P77848, SEQ ID NO: 104); R. gnavus ATCC 29149 RgNanH (Uniprot accession no. A7B557, SEQ ID NO: 105); S. typhimurium TA262/LT2 sialidase (NanH;STSA) (P29768, SEQ ID NO: 106).

[0111] Other exemplary sialidases include Sialidases or neuraminidases from A. castellani, A. polyphaga, A. culbertsoni, A. astronyxis, A. hatchetti, A. palestinensis, A. rhysodes, E. tenella, E. maxima, E. necatrix, E. Spec, T. brucei, and T. rangeli.

[0112] c. Mouse Sialidases

[0113] Four sialidases have also been found in the mouse genome and are referred to as Neu1, Neu2, Neu3 and Neu4. The amino acid sequence of mouse Neu1 is depicted in SEQ ID NO: 38, and a nucleotide sequence encoding mouse Neu1 is depicted in SEQ ID NO: 42. The amino acid sequence of mouse Neu2 is depicted in SEQ ID NO: 39 and a nucleotide sequence encoding mouse Neu2 is depicted in SEQ ID NO: 43. The amino acid sequence of mouse Neu3 is depicted in SEQ ID NO: 40, and a nucleotide sequence encoding mouse Neu3 is depicted in SEQ ID NO: 44. The amino acid sequence of mouse Neu4 is depicted in SEQ ID NO: 41, and a nucleotide sequence encoding mouse Neu4 is depicted in SEQ ID NO: 45.

[0114] d. Human Sialidases

[0115] Four sialidases have also been found in the human genome and are referred to as Neu1, Neu2, Neu3 and Neu4.

[0116] Human Neu1 is a lysosomal neuraminidase enzyme which functions in a complex with beta-galactosidase and cathepsin A. The amino acid sequence of human Neu1 is depicted in SEQ ID NO: 7, and a nucleotide sequence encoding human Neu1 is depicted in SEQ ID NO: 23.

[0117] Human Neu2 is a cytosolic sialidase enzyme. The amino acid sequence of human Neu2 is depicted in SEQ ID NO: 1, and a nucleotide sequence encoding human Neu2 is depicted in SEQ ID NO: 24.

[0118] Human Neu3 is a plasma membrane sialidase with an activity specific for gangliosides. Human Neu3 has two isoforms: isoform 1 and isoform 2. The amino acid sequence of human Neu3, isoform 1 is depicted in SEQ ID NO: 8, and a nucleotide sequence encoding human Neu3, isoform 1 is depicted in SEQ ID NO: 25. The amino acid sequence of human Neu3, isoform 2 is depicted in SEQ ID NO: 9, and a nucleotide sequence encoding human Neu3, isoform 2 is depicted in SEQ ID NO: 34.

[0119] Human Neu4 has two isoforms: isoform 1 is a peripheral membrane protein and isoform 2 localizes to the lysosome lumen. The amino acid sequence of human Neu4, isoform 1 is depicted in SEQ ID NO: 10, and a nucleotide sequence encoding human Neu4, isoform 1 is depicted in SEQ ID NO: 26. The amino acid sequence of human Neu4, isoform 2 is depicted in SEQ ID NO: 11, and a nucleotide sequence encoding human Neu4, isoform 2 is depicted in SEQ ID NO: 35.

[0120] In certain embodiments, a recombinant mutant human sialidase has about 5%, about 10%, about 15%, about 20%, about 25%, about 30%, about 35%, about 40%, about 45%, about 50%, about 60%, about 65%, about 70%, about 75%, about 80%, about 85%, about 90%, about 95%, about 100%, or more than 100% of the enzymatic activity of a corresponding (or template) wild-type human sialidase.

[0121] In certain embodiments, the recombinant mutant human sialidase has the same substrate specificity as the corresponding wild-type human sialidase. In other embodiments, the recombinant mutant human sialidase has a different substrate specificity than the corresponding wild-type human sialidase. For example, in certain embodiments the recombinant mutant human sialidase can cleave α2,3, α2,6, and/or α2,8 linkages. In certain embodiments the sialidase can cleave α2,3 and α2,8 linkages.

[0122] In certain embodiments, the expression yield of the recombinant mutant human sialidase in mammalian cells, e.g., HEK293 cells, CHO cells, murine myeloma cells (NS0, Sp2/0), or human fibrosarcoma cells (HT-1080), e.g., HEK293 cells, is greater than about 10%, about 20%, about 50%, about 75%, about 100%, about 150%, about 200%, about 250%, about 300%, about 400%, about 500%, about 600%, about 700%, about 800%, about 900%, or about 1,000% of the expression yield of the corresponding wild-type human sialidase.

[0123] In certain embodiments, the recombinant mutant human sialidase has about 5%, about 10%, about 15%, about 20%, about 25%, about 30%, about 35%, about 40%, about 45%, about 50%, about 60%, about 65%, about 70%, about 75%, about 80%, about 85%, about 90%, about 95%, about 100%, or more than 100% of the enzymatic activity of a corresponding wild-type human sialidase, and the expression yield of the recombinant mutant human sialidase in mammalian cells, e.g., HEK293 cells, is greater than about 10%, about 20%, about 50%, about 75%, about 100%, about 150%, about 200%, about 250%, about 300%, about 400%, about 500%, about 600%, about 700%, about 800%, about 900%, or about 1,000% of the expression yield of a corresponding wild-type human sialidase.

[0124] In certain embodiments, the amino acid sequence of the recombinant mutant human sialidase has at least 60%, 65%, 70%, 75%, 80%, 85%, 90%, 95%, 96%, 97%, 98%, or 99% sequence identity to the amino acid sequence of a corresponding wild-type human sialidase.

[0125] It is understood that the sialidases described herein, for example, the human sialidases, can be modified to enhance one or more properties of the enzyme, e.g., to improve expression, activity, stability (e.g., improve resistance to protease degradation). Some of these properties are applicable to the various sialidases described herein, e.g., the improved resistance to protease degradation.

[0126] i. Substitution of Cysteine Residues

[0127] In certain embodiments, the recombinant mutant human sialidase comprises a substitution of at least one cysteine (cys, C) residue. It has been discovered that certain cysteine residues in sialidases may inhibit expression of functional protein as a result of protein aggregation. Accordingly, in certain embodiments, the recombinant mutant human sialidase contains at least one mutation to remove a free cysteine (e.g., for Neu1 (SEQ ID NO: 7), a mutation of one or more of C111, C117, C171, C183, C218, C240, C242, and C252; for Neu2 (SEQ ID NO: 1), a mutation of one or more of C125, C196, C219, C272, C332, and C352; for Neu3 (SEQ ID NO: 8), a mutation of one or more of C7, C90, C99, C106, C127, C136, C189, C194, C226, C242, C250, C273, C279, C295, C356, C365, C368, C384, C383, C394, and C415; and for Neu4 (SEQ ID NO: 10), a mutation of one or more of C88, C125, C126, C186, C191, C211, C223, C239, C276, C437, C453, C480, and C481). Free cysteines can be substituted with any amino acid. In certain embodiments, the free cysteine is substituted with serine (ser, S), isoleucine (iso, I), valine (val, V), phenylalanine (phe, F), leucine (leu, L), or alanine (ala, A). Exemplary cysteine substitutions in Neu2 include C125A, C1251, C125S, C125V, C196A, C196L, C196V, C272S, C272V, C332A, C332S, C332V, C352L, and C352V.

[0128] In certain embodiments, the recombinant mutant human sialidase comprises two or more cysteine substitutions. Exemplary double or triple substitutions in Neu2 include: C125S and C332S; C272V and C332A; C272V and C332S; C332A and C352L; C125S and C196L; C196L and C352L; C196L and C332A; C332A and C352L; and C196L, C332A and C352L.

[0129] In certain embodiments, the recombinant mutant human sialidase is a Neu2 sialidase and comprises the substitutions C322A and C352L (SEQ ID NO: 5).

[0130] In certain embodiments, the sialidase contains an amino acid substitution at 2, 3, 4, 5, or 6 cysteines typically present in a human sialidase, e.g., Neu2 or Neu3.

[0131] In certain embodiments, the recombinant mutant human sialidase comprises a substitution or combination of substitutions corresponding to a substitution or combination of substitutions listed in TABLE 1 (amino acid positions corresponding to wild-type human Neu2 (SEQ ID NO: 1)).

TABLE 1
Substitution(s)

C125A
C125I
C125S
C125V
C196A
C196L
C196V
C272S
C272V
C332A
C332S
C332V
C352L
C352V
C125S + C332S
C272V + C332A
C272V + C332S
C332A + C352L
C125S + C196L
C196L + C352L
C196L + C332A
C196L + C332A + C352L

[0132] ii. Substitutions of Residues to Increase pI and/or Decrease Hydrophobicity

[0133] The isoelectric point (pI) of a protein is the pH at which the net charge is zero. The pI also indicates the pH at which the protein is least soluble, which affects the ability to express and purify the protein. Generally, a protein has good solubility if its pI is greater than 2 units above the pH of the solution. Human Neu2 has a predicted pI of 7.5. Thus, human Neu2 is least soluble around neutral pH, which is undesirable because expression and physiological systems are at neutral pH. In contrast, the sialidase from Salmonella typhimurium (St-sialidase), which exhibits good solubility and recombinant expression, has a pI of 9.6. Accordingly, to increase expression of human Neu2 or the other human sialidases, a recombinant mutant human sialidase may be designed to contain one or more amino acid substitution(s) wherein the substitution(s) increase(s) the pI of the sialidase relative to a sialidase without the substitution. Additionally, decreasing the number of hydrophobic amino acids on the surface of a sialidase may improve expression of sialidase by, for example, reducing aggregation. Accordingly, to increase expression of human Neu2 or the other human sialidases, a recombinant mutant human sialidase may be designed to contain one or more amino acid substitution(s) wherein the substitution(s) decrease(s) the hydrophobicity of a surface of the sialidase relative to a sialidase without the substitution(s).

[0134] Accordingly, in certain embodiments, the recombinant mutant human sialidase comprises at least one amino acid substitution, wherein the substitution increases the isoelectric point (pI) of the sialidase and/or decreases the hydrophobicity of the sialidase relative to a sialidase without the substitution. This may be achieved by introducing one or more charged amino acids, for example, positively or negatively charged amino acids, into the recombinant sialidase. In certain embodiments, the amino acid substitution is to a charged amino acid, for example, a positively charged amino acid such as lysine (lys, K), histidine (his, H), or arginine (arg, R), or a negatively charged amino acid such as aspartic acid (asp, D) or glutamic acid (glu, E). In certain embodiments, the amino acid substitution is to a lysine residue. In certain embodiments, the substitution increases the pI of the sialidase to about 7.75, about 8, about 8.25, about 8.5, about 8.75, about 9, about 9.25, about 9.5, or about 9.75.

[0135] In certain embodiments, the amino acid substitution occurs at a surface exposed D or E amino acid, in a helix or loop, or in a position that has a K or R in the corresponding position of St-sialidase. In certain embodiments, the amino acid substitution occurs at an amino acid that is remote from the catalytic site or otherwise not involved in catalysis, an amino acid that is not conserved with the other human Neu proteins or with an St-Sialidase or Clostridium NanH, or an amino acid that is not located in a domain important for function (e.g., an Asp-box or beta strand).

[0136] Exemplary amino acid substitutions in Neu2 that increase the isoelectric point (pI) of the sialidase and/or decrease the hydrophobicity of the sialidase relative to a sialidase without the substitution include A2E, A2K, D215K, V325E, V325K, E257K, and E319K. In certain embodiments, the recombinant mutant human sialidase comprises two or more amino acid substitutions, including, for example, A2K and V325E, A2K and V325K, E257K and V325K, A2K and E257K, and E257K and A2K and V325K.

[0137] In certain embodiments, the recombinant mutant human sialidase comprises a substitution or combination of substitutions corresponding to a substitution or combination of substitutions listed in TABLE 2 (amino acid positions corresponding to wild-type human Neu2 (SEQ ID NO: 1)).

TABLE 2
Substitution(s)
A2K
E72K
D215K
E257K
V325K
A2K + E257K
A2K + V325E
A2K + V325K
E257K + V325K

[0138] iii. Addition of N-terminal Peptides and N- or C-terminal Substitutions

[0139] It has been discovered that the addition of a peptide sequence of two or more amino acids to the N-terminus of a human sialidase can improve expression and/or activity of the sialidase. In certain embodiments, the peptide is at least 2 amino acids in length, for example, from 2 to 20, from 2 to 10, from 2 to 5, or 2, 3, 4, 5, 6, 7, 8, 9, 10, 11, 12, 13, 14, 15, 16, 17, 18, 19, or 20 amino acids in length. In certain embodiments, the peptide may form, or have a propensity to form, an α-helix.

[0140] In mice, a Neu2 isoform (type B) found in thymus contains six amino acids not present in the canonical isoform of Neu2 found in skeletal muscle. In certain embodiments herein, the N-terminal six amino acids of the mouse thymus Neu2 isoform, MEDLRP (SEQ ID NO: 4), or variations thereof, can be added onto a human Neu, e.g., human Neu2. In certain embodiments, the recombinant mutant human sialidase comprises a peptide at least two amino acid residues in length covalently associated with an N-terminal amino acid of the sialidase. In certain embodiments the recombinant mutant human sialidase comprises the peptide MEDLRP (SEQ ID NO: 4) or EDLRP (SEQ ID NO: 3) covalently associated with an N-terminal amino acid of the sialidase. In certain embodiments, the sialidase may further comprise a cleavage site, e.g., a proteolytic cleavage site, located between the peptide, e.g., MEDLRP (SEQ ID NO: 4) or EDLRP (SEQ ID NO: 3), and the remainder of the sialidase. In certain embodiments, the peptide, e.g., MEDLRP (SEQ ID NO: 4) or EDLRP (SEQ ID NO: 3), may be post-translationally cleaved from the remainder of the sialidase.

[0141] Alternatively to, or in combination with, the N-terminal addition, 1-5 amino acids of the 12 amino acid N-terminal region of the recombinant mutant human sialidase may be removed, e.g., the N-terminal methionine can be removed. In certain embodiments, if the recombinant mutant human sialidase is Neu2, the N-terminal methionine can be removed, the first five amino acids (MASLP; SEQ ID NO: 12) can be removed, or the second through fourth amino acids (ASLP; SEQ ID NO: 13) can be removed.

[0142] In certain embodiments, 1-5 amino acids of the 12 amino acid N-terminal region of the recombinant mutant human sialidase are substituted with MEDLRP (SEQ ID NO: 4), EDLRP (SEQ ID NO: 3), or TVEKSVVF (SEQ ID NO: 14). For example, in certain embodiments, if the recombinant mutant human sialidase is Neu2, the amino acids MASLP (SEQ ID NO: 12), ASLP (SEQ ID NO: 13) or M are substituted with MEDLRP (SEQ ID NO: 4), EDLRP (SEQ ID NO: 3) or TVEKSVVF (SEQ ID NO: 14).

[0143] Human sialidases have a β-propeller structure, characterized by 6 blade-shaped β-sheets arranged toroidally around a central axis. Generally, hydrophobic interactions between the blades of a β-propeller, including between the N- and C-terminal blades, enhance stability. Accordingly, in order to increase expression of human Neu2 or the other human sialidases, a recombinant mutant human sialidase can be designed comprising an amino acid substitution that increases hydrophobic interactions and/or hydrogen bonding between the N- and C-terminal β-propeller blades of the sialidase.

[0144] Accordingly, in certain embodiments, the recombinant mutant human sialidase comprises a substitution of at least one wild-type amino acid residue, wherein the substitution increases hydrophobic interactions and/or hydrogen bonding between the N- and C-termini of the sialidase relative to a sialidase without the substitution. In certain embodiments, the wild-type amino acid is substituted with asparagine (asn, N), lysine (lys, K), tyrosine (tyr, Y), phenylalanine (phe, F), or tryptophan (trp, W). Exemplary substitutions in Neu2 that increase hydrophobic interactions and/or hydrogen bonding between the N- and C-termini include L4N, L4K, V6Y, L7N, L4N and L7N, L4N and V6Y and L7N, V12N, V12Y, V12L, V6Y, V6F, or V6W. In certain embodiments, the sialidase comprises the V6Y substitution.

[0145] In certain embodiments, the recombinant mutant human sialidase comprises a combination of the above substitutions. For example, a recombinant mutant human Neu2 sialidase can comprise the additional amino acids MEDLRP (SEQ ID NO: 4), EDLRP (SEQ ID NO: 3), or TVEKSVVF (SEQ ID NO: 14) at the N-terminus and, in combination, can comprise at least one L4N, L4K, V6Y, L7N, L4N and L7N, L4N and V6Y and L7N, V12N, V12Y, V12L, V6Y, V6F, or V6W substitution. In certain embodiments, the amino acids MASLP (SEQ ID NO: 12), ASLP (SEQ ID NO: 13) or M of a recombinant mutant human Neu2 sialidase are replaced with MEDLRP (SEQ ID NO: 4), EDLRP (SEQ ID NO: 3) or TVEKSVVF (SEQ ID NO: 14) and the recombinant mutant human Neu2 sialidase also comprises at least one L4N, L4K, V6Y, L7N, L4N and L7N, L4N and V6Y and L7N, V12N, V12Y, V12L, V6Y, V6F, or V6W substitution.

[0146] In certain embodiments, the recombinant mutant human sialidase comprises a mutation or combination of mutations corresponding to a mutation or combination of mutations listed in TABLE 3 (amino acid positions corresponding to wild-type human Neu2 (SEQ ID NO: 1)).

TABLE 3
Mutation(s)
Substitute M at the N-terminus with EDLRP (SEQ ID NO: 3)
Substitute M at the N-terminus with MEDLRP (SEQ ID NO: 4)
Insert MEDLRP (SEQ ID NO: 4) at the N-terminus
Substitute MASLP (SEQ ID NO: 12) at the N-terminus with
MEDLRP (SEQ ID NO: 4)
L4N
V6Y
L7N
V6F
V6W

[0147] Additionally, in certain embodiments, the sialidase comprises a substitution or deletion of an N-terminal methionine at the N-terminus of the sialidase. For example, in certain embodiments, the sialidase comprises a substitution of a methionine residue at a position corresponding to position 1 of wild-type human Neu2 (SEQ ID NO: 1), e.g., the methionine at a position corresponding to position 1 of wild-type human Neu2 is substituted by alanine (M1A) or aspartic acid (M1D). In other embodiments, the sialidase comprises a deletion of a methionine residue at a position corresponding to position 1 (ΔM1) of wild-type human Neu2 (SEQ ID NO: 1).

[0148] In certain embodiments, the recombinant mutant human sialidase comprises a substitution or combination of substitutions corresponding to a substitution or combination of substitutions listed in TABLE 4 (amino acid positions corresponding to wild-type human Neu2 (SEQ ID NO: 1)).

TABLE 4
Mutation(s)
Deletion of M1, V6Y, I187K
M1R, V6Y, I187K
M1H, V6Y, I187K
M1K, V6Y, I187K
M1D, V6Y, I187K
M1T, V6Y, I187K
M1N, V6Y, I187K
M1Q, V6Y, I187K
M1G, V6Y, I187K
M1A, V6Y, I187K
M1V, V6Y, I187K
M1L, V6Y, I187K
M1F, V6Y, I187K
M1Y, V6Y, I187K

[0149] d. Substitutions of Residues to Decrease Proteolytic Cleavage

[0150] It has been discovered that certain sialidases (e.g., human Neu2) are susceptible to cleavage by a protease (e.g., trypsin). As a result, proteolytic cleavage of the sialidase may occur during recombinant protein production, harvesting, purification, formulation, during administration to a subject, or after administration to a subject, or any combination of the foregoing. Accordingly, in certain embodiments, the recombinant mutant human sialidase comprises a substitution of at least one wild-type amino acid residue, wherein the substitution decreases cleavage of the sialidase by a protease (e.g., trypsin) relative to a sialidase without the substitution.

[0151] In certain embodiments, incubation of the recombinant mutant human sialidase with a protease (e.g., trypsin) results in from about 1% to about 50%, from about 1% to about 40%, from about 1%, to about 30%, from about 1% to about 20%, from about 1% to about 10%, from about 1% to about 5%, from about 5% to about 50%, from about 5% to about 40%, from about 5% to about 30%, from about 5% to about 20%, from about 5% to about 10%, from about 10% to about 50%, from about 10% to about 40%, from about 10% to about 30%, from about 10% to about 20%, from about 20% to about 50%, from about 20% to about 40%, from about 20% to about 30%, from about 30% to about 50%, from about 30% to about 40%, or from about 40% to about 50% of the proteolytic cleavage of a corresponding wild-type sialidase when incubated with the protease under the same conditions. In certain embodiments, incubation of the recombinant mutant human sialidase with a protease (e.g., trypsin) results in less than 50%, less than 40%, less than 30%, less than 10%, less than 5%, less than 3%, less than 1%, or less than 0.5% of the proteolytic cleavage of a corresponding wild-type sialidase when incubated with the protease under the same conditions. Proteolytic cleavage can be assayed by any method known in the art, including for example, by SDS-PAGE as described in Example 5 herein.

[0152] Exemplary substitutions that increase resistance to proteolytic cleavage include: (i) a substitution of an alanine residue at a position corresponding to position 242 of wild-type human Neu2 (SEQ ID NO: 1), e.g., a substitution by cysteine (A242C), phenylalanine (A242F), glycine (A242G), histidine (A242H), isoleucine (A242I), lysine (A242K), leucine (A242L), methionine (A242M), asparagine (A242N), glutamine (A242Q), arginine (A242R), serine (A242S), valine (A242V), tryptophan (A242W), or tyrosine (A242Y); (ii) a substitution of an arginine residue at a position corresponding to position 243 of wild-type human Neu2 (SEQ ID NO: 1), e.g., a substitution by glutamic acid (R243E), histidine (R243H), asparagine (R243N), glutamine (R243Q), or lysine (R243K); (iii) a substitution of a valine residue at a position corresponding to position 244 of wild-type human Neu2 (SEQ ID NO: 1), e.g., a substitution by isoleucine (V244I), lysine (V244K), or proline (V244P); or (iv) a combination of any of the foregoing. In certain embodiments, the recombinant mutant human sialidase comprises a substitution selected from A242C, A242F, A242Y, and A242W. In certain embodiments, the recombinant mutant human sialidase comprises a substitution or combination of substitutions corresponding to a substitution or combination of substitutions listed in TABLE 5 (amino acid positions corresponding to wild-type human Neu2 (SEQ ID NO: 1)).

TABLE 5

| Wild Type | |
|---|---|
| Human Neu2 | |
| (SEQ ID NO: 1) | |
| Amino Acid | Exemplary Substitution(s) at Specified Position(s) |
| A242 | C, F, G, H, I, K, L, M, N, P, Q, R, S, V, W, Y |
| R243 | E, H, N, Q, K |
| V244 | I, K, P |

[0153] Additional exemplary substitutions that increase resistance to proteolytic cleavage (and/or increase expression yield and/or enzymatic activity) include: (i) a substitution of a leucine residue at a position corresponding to position 240 of wild-type human Neu2 (SEQ ID NO: 1), e.g., a substitution by aspartic acid (L240D), asparagine (L240N), or tyrosine (L240Y); (ii) a substitution of an alanine residue at a position corresponding to position 213 of wild-type human Neu2 (SEQ ID NO: 1), e.g., a substitution by cysteine (A213C), asparagine (A213N), serine (A213S), or threonine (A213T); (iii) a substitution of an arginine residue at a position corresponding to position 241 of wild-type human Neu2 (SEQ ID NO: 1), e.g., a substitution by alanine (R241A), aspartic acid (R241D), leucine (R241L), glutamine (R241Q). or tyrosine (R241Y); (iv) a substitution of a serine residue at a position corresponding to position 258 of wild-type human Neu2 (SEQ ID NO: 1), e.g., a substitution by cysteine (S258C); (v) a substitution of a leucine residue at a position corresponding to position 260 of wild-type human Neu2 (SEQ ID NO: 1), e.g., a substitution by aspartic acid (L260D), phenylalanine (L260F), glutamine (L260Q), or threonine (L260T); (vi) a substitution of a valine residue at a position corresponding to position 265 of wild-type human Neu2 (SEQ ID NO: 1), e.g., a substitution by phenylalanine (V265F); or (vii) a combination of any of the foregoing. It is contemplated that, in certain embodiments, a substitution or a combination of substitutions at these positions may improve hydrophobic and/or aromatic interaction between secondary structure elements in the sialidase (e.g., between an α-helix and the nearest β-sheet) thereby stabilizing the structure and improving resistance to proteolytic cleavage.

[0154] In certain embodiments, the recombinant mutant sialidase comprises a mutation at position L240. In certain embodiments, the recombinant mutant sialidase comprises a combination of mutations at positions (i) A213 and A242, (ii) A213, A242, and S258, (iii) L240 and L260, (iv) R241 and A242, (v) A242 and L260, (vi) A242 and V265, and (vii) L240 and A242. In certain embodiments, the recombinant mutant human sialidase comprises a combination of substitutions selected from (i) A213C, A242F, and S258C, (ii) A213C and A242F, (iii) A213T and A242F, (iv) R241Y and A242F, or (v) L240Y and A242F. In certain embodiments, the recombinant mutant human sialidase comprises a substitution or combination of substitutions corresponding to a substitution or combination of substitutions listed in TABLE 6 (amino acid positions corresponding to wild-type human Neu2 (SEQ ID NO: 1)).

TABLE 6
Substitution(s)
A242C, V244P
A242R, V244R
A242R, V244H
A242Y, V244P
A242T, V244P
A242N, V244P
A213C, A242F
A213S, A242F
A213T, A242F
A213N, A242F
A213C, A242F, S258C
A242F, L260F
A242F, V265F
L240Y
L240Y, L260F
L240D, L260T
L240N, L260T
L240N, L260D
L240N, L260Q
L240Y, A242F
R241A, A242F
R241Y, A242F

[0155] iv. Other Substitutions

[0156] The invention further provides a recombinant mutant human sialidase comprising at least one of the following substitutions: I187K, A328E, K370N, or H210N. In certain embodiments, a recombinant mutant human Neu2 comprises the substitution of the amino acids GDYDAPTHQVQW (SEQ ID NO: 15) with the amino acids SMDQGSTW (SEQ ID NO: 16) or STDGGKTW (SEQ ID NO: 17). In certain embodiments, a recombinant mutant human Neu2 comprises the substitution of the amino acids PRPPAPEA (SEQ ID NO: 18) with the amino acids QTPLEAAC (SEQ ID NO: 19). In certain embodiments, a recombinant mutant human Neu2 comprises the substitution of the amino acids NPRPPAPEA (SEQ ID NO: 20) with the amino acids SQNDGES (SEQ ID NO: 21).

[0157] The invention further provides a recombinant mutant human sialidase comprising at least one substitution at a position corresponding to V212, A213, Q214, D215, T216, L217, E218, C219, Q220, V221, A222, E223, V224, E225, or T225.

[0158] The invention further provides a recombinant mutant human sialidase comprising an amino acid substitution at a position identified in TABLE 7 (amino acid positions corresponding to wild-type human Neu2 (SEQ ID NO: 1). In certain embodiments, the sialidase comprises an amino acid substitution identified in TABLE 7. In certain embodiments, the sialidase comprises a combination of any amino acid substitution identified in TABLE 7.

TABLE 7

| Wild Type | |
|---|---|
| Human Neu2 | |
| (SEQ ID NO: 1) | |
| Amino Acid | Substitution at Specified Position |
| M1 | D |
| L4 | S, T, Y, L, F, A, P, V, I, N, D, H |
| P5 | G |
| V6 | Y |
| L7 | F, Y, S, I, T, N |
| K9 | D |
| V12 | L, A, P, V, N, D, H |
| F13 | S, N, R, K, T, G, D, E, A |
| I22 | S, N, R, K, T, G, D, E, A, Y, L, F, P, V, I, H |
| A24 | S, N, R, K, T, G, D, E, A, Y, L, F, P, V, I, H |
| L34 | S, T, Y, L, F, A, P, V, I, N, D, H |
| A36 | S, T, Y, L, F, A, P, V, I, N, D, H |
| K44 | R, E |
| K45 | A, E, R |
| L54 | M |
| P62 | H, G, N, T, S, F, I, D, E |
| H64 | F, Y, S, I, T, N |
| Q69 | H |
| R78 | K |
| D80 | P |
| P89 | S, T, Y, L, F, A, P, V, I, N, D, H, M |
| A93 | E,K |
| G107 | D |
| Q108 | H |
| Q112 | R, K |
| C125 | Y, F, L |
| Q126 | E, F, H, I, L, or Y |
| A150 | V |
| T156 | R, N, D, C, G, H, I, L, F, S, Y, V, A, P, T |
| F157 | R, N, D, C, G, H, I, L, F, S, Y, V, A, P |
| A158 | R, N, D, C, G, H, I, L, F, S, Y, V, A, P, T |
| V159 | R, N, D, C, G, H, I, L, F, S, Y, V, A, P |
| G160 | R, N, D, C, G, H, I, L, F, S, Y, V, A, P, T |
| P161 | R, N, D, C, G, H, I, L, F, S, Y, V, A, P |
| G162 | R, N, D, C, G, H, I, L, F, S, Y, V, A, P, T |
| H163 | R, N, D, C, G, H, I, L, F, S, Y, V, A, P |
| C164 | R, N, D, C, G, H, I, L, F, S, Y, V, A, P, T |
| L165 | R, N, D, C, G, H, I, L, F, S, Y, V, A, P |
| R170 | P |
| A171 | G |
| V176 | R, N, D, C, G, H, I, L, F, S, Y, V, P, A |
| P177 | S, T, Y, L, F, A, P, V, I, N, D, H |
| A178 | S, T, Y, L, F, A, P, V, I, N, D, H |
| L184 | S, N, R, K, T, G, D, E, A, F, H, I, L, P, V, Y |
| H185 | S, N, R, K, T, G, D, E, A |
| P186 | S, N, R, K, T, G, D, E, A, F, H, I, L, P, V, Y, |
| I187 | S, N, R, K, T, G, D, E, A |
| Q188 | P, S, N, R, K, T, G, D, E, A |
| R189 | P |
| P190 | F, M, A, D, G, H, N, P, R, S, T |
| I191 | M, A, D, F, H, I, L, N, P, S, T, V, Y, E, G, K, R |
| A194 | S, T, Y, L, F, A, P, V, I, N, D, H |
| A213 | C, N, S, or T |
| L217 | R, N, D, C, G, H, I, L, F, S, Y, V |
| C219 | R, N, D, C, G, H, I, L, F, S, Y, V |
| A222 | D |
| E225 | P |
| T249 | A |
| D251 | G |
| E257 | P |
| S258 | C |
| L260 | D, F,Q, or T |
| V265 | F |
| Q270 | S, T, A, H, P, F |
| G271 | S, N, R, K, T, G, D, E, A |
| C272 | S, N, R, K, T, G, D, E, A, C, H, Y, F, H, L, P, V |
| W292 | R |
| S301 | A, D, E, F, G, H, I, K, L, M, N, P, Q, T, V, W, Y, |
| | C, or R |
| W302 | A, D, E, F, G, H, I, L, M, N, P, Q, R, S, T, V, Y, or |
| | K |
| E319 | D |
| V325 | F, Y, S, I, T, N, A, D, H, L, P, V |
| L326 | F, Y, S, I, T, N, A, D, H, L, P, V |
| L327 | F, Y, S, I, T, N, A, D, H, L, P, V |
| C332 | A, D, G, H, N, P, R, S, T |
| Y359 | A, S |
| V363 | R, S, T, Y, L, F, A, P, V, I, N, D, H |
| L365 | K, Q, F, Y, S, I, T, N, A, D, H, L, P, V |

[0159] For example, in certain embodiments, the recombinant mutant human sialidase comprises: (a) a substitution of a proline residue at a position corresponding to position 5 of wild-type human Neu2 (P5); (b) a substitution of a lysine residue at a position corresponding to position 9 of wild-type human Neu2 (K9); (c) a substitution of a lysine residue at a position corresponding to position 44 of wild-type human Neu2 (K44); (d) a substitution of a lysine residue at a position corresponding to position 45 of wild-type human Neu2 (K45); (e) a substitution of a leucine residue at a position corresponding to position 54 of wild-type human Neu2 (L54); (f) a substitution of a proline residue at a position corresponding to position 62 of wild-type human Neu2 (P62); (g) a substitution of a glutamine residue at a position corresponding to position 69 of wild-type human Neu2 (Q69); (h) a substitution of an arginine residue at a position corresponding to position 78 of wild-type human Neu2 (R78); (i) a substitution of an aspartic acid residue at a position corresponding to position 80 of wild-type human Neu2 (D80); (j) a substitution of an alanine residue at a position corresponding to position 93 of wild-type human Neu2 (A93); (k) a substitution of a glycine residue at a position corresponding to position 107 of wild-type human Neu2 (G107); (1) a substitution of a glutamine residue at a position corresponding to position 108 of wild-type human Neu2 (Q108); (m) a substitution of a glutamine residue at a position corresponding to position 112 of wild-type human Neu2 (Q112); (n) a substitution of a cysteine residue at a position corresponding to position 125 of wild-type human Neu2 (C125); (o) a substitution of a glutamine residue at a position corresponding to position 126 of wild-type human Neu2 (Q126); (p) a substitution of an alanine residue at a position corresponding to position 150 of wild-type human Neu2 (A150); (q) a substitution of a cysteine residue at a position corresponding to position 164 of wild-type human Neu2 (C164); (r) a substitution of an arginine residue at a position corresponding to position 170 of wild-type human Neu2 (R170); (s) a substitution of an alanine residue at a position corresponding to position 171 of wild-type human Neu2 (A171); (t) a substitution of a glutamine residue at a position corresponding to position 188 of wild-type human Neu2 (Q188); (u) a substitution of an arginine residue at a position corresponding to position 189 of wild-type human Neu2 (R189); (v) a substitution of an alanine residue at a position corresponding to position 213 of wild-type human Neu2 (A213); (w) a substitution of a leucine residue at a position corresponding to position 217 of wild-type human Neu2 (L217); (x) a substitution of a glutamic acid residue at a position corresponding to position 225 of wild-type human Neu2 (E225); (y) a substitution of a histidine residue at a position corresponding to position 239 of wild-type human Neu2 (H239); (z) a substitution of a leucine residue at a position corresponding to position 240 of wild-type human Neu2 (L240); (aa) a substitution of an arginine residue at a position corresponding to position 241 of wild-type human Neu2 (R241); (bb) a substitution of an alanine residue at a position corresponding to position 242 of wild-type human Neu2 (A242); (cc) a substitution of a valine residue at a position corresponding to position 244 of wild-type human Neu2 (V244); (dd) a substitution of a threonine residue at a position corresponding to position 249 of wild-type human Neu2 (T249); (ee) a substitution of an aspartic acid residue at a position corresponding to position 251 of wild-type human Neu2 (D251); (ff) a substitution of a glutamic acid residue at a position corresponding to position 257 of wild-type human Neu2 (E257); (gg) a substitution of a serine residue at a position corresponding to position 258 of wild-type human Neu2 (S258); (hh) a substitution of a leucine residue at a position corresponding to position 260 of wild-type human Neu2 (L260); (ii) a substitution of a valine residue at a position corresponding to position 265 of wild-type human Neu2 (V265); (jj) a substitution of a glutamine residue at a position corresponding to position 270 of wild-type human Neu2 (Q270); (kk) a substitution of a tryptophan residue at a position corresponding to position 292 of wild-type human Neu2 (W292); (ll) a substitution of a serine residue at a position corresponding to position 301 of wild-type human Neu2 (S301); (mm) a substitution of a tryptophan residue at a position corresponding to position 302 of wild-type human Neu2 (W302); (nn) a substitution of a valine residue at a position corresponding to position 363 of wild-type human Neu2 (V363); or (oo) a substitution of a leucine residue at a position corresponding to position 365 of wild-type human Neu2 (L365); or a combination of any of the foregoing substitutions. For example, the sialidase may comprise a substitution of K9, P62, A93, Q216, A242, Q270, 5301, W302, V363, or L365, or a combination of any of the foregoing substitutions.

[0160] In certain embodiments, in the sialidase: (a) the proline residue at a position corresponding to position 5 of wild-type human Neu2 is substituted by histidine (P5H); (b) the lysine residue at a position corresponding to position 9 of wild-type human Neu2 is substituted by aspartic acid (K9D); (c) the lysine residue at a position corresponding to position 44 of wild-type human Neu2 is substituted by arginine (K44R) or glutamic acid (K44E); (d) the lysine residue at a position corresponding to position 45 of wild-type human Neu2 is substituted by alanine (K45A), arginine (K45R), or glutamic acid (K45E); (e) the leucine residue at a position corresponding to position 54 of wild-type human Neu2 is substituted by methionine (L54M); (f) the proline residue at a position corresponding to position 62 of wild-type human Neu2 is substituted by asparagine (P62N), aspartic acid (P62D), histidine (P62H), glutamic acid (P62E), glycine (P62G), serine (P62S), or threonine (P62T); (g) the glutamine residue at a position corresponding to position 69 of wild-type human Neu2 is substituted by histidine (Q69H); (h) the arginine residue at a position corresponding to position 78 of wild-type human Neu2 is substituted by lysine (R78K); (i) the aspartic acid residue at a position corresponding to position 80 of wild-type human Neu2 is substituted by proline (D80P); (j) the alanine residue at a position corresponding to position 93 of wild-type human Neu2 is substituted by glutamic acid (A93E) or lysine (A93K); (k) the glycine residue at a position corresponding to position 107 of wild-type human Neu2 is substituted by aspartic acid (G107D); (1) the glutamine residue at a position corresponding to position 108 of wild-type human Neu2 is substituted by histidine (Q108H); (m) the glutamine residue at a position corresponding to position 112 of wild-type human Neu2 is substituted by arginine (Q112R) or lysine (Q112K); (n) the cysteine residue at a position corresponding to position 125 of wild-type human Neu2 is substituted by leucine (C125L); (o) the glutamine residue at a position corresponding to position 126 of wild-type human Neu2 is substituted by leucine (Q126L), glutamic acid (Q126E), phenylalanine (Q126F), histidine (Q126H), isoleucine (Q126I), or tyrosine (Q126Y); (p) the alanine residue at a position corresponding to position 150 of wild-type human Neu2 is substituted by valine (A150V); (q) the cysteine residue at a position corresponding to position 164 of wild-type human Neu2 is substituted by glycine (C164G); (r) the arginine residue at a position corresponding to position 170 of wild-type human Neu2 is substituted by proline (R170P); (s) the alanine residue at a position corresponding to position 171 of wild-type human Neu2 is substituted by glycine (A171G); (t) the glutamine residue at a position corresponding to position 188 of wild-type human Neu2 is substituted by proline (Q188P); (u) the arginine residue at a position corresponding to position 189 of wild-type human Neu2 is substituted by proline (R189P); (v) the alanine residue at a position corresponding to position 213 of wild-type human Neu2 is substituted by cysteine (A213C), asparagine (A213N), serine (A213S), or threonine (A213T); (w) the leucine residue at a position corresponding to position 217 of wild-type human Neu2 is substituted by alanine (L217A) or valine (L217V); (x) the threonine residue at a position corresponding to position 249 of wild-type human Neu2 is substituted by alanine (T249A); (y) the aspartic acid residue at a position corresponding to position 251 of wild-type human Neu2 is substituted by glycine (D251G); (z) the glutamic acid residue at a position corresponding to position 225 of wild-type human Neu2 is substituted by proline (E225P); (aa) the histidine residue at a position corresponding to position 239 of wild-type human Neu2 is substituted by proline (H239P); (bb) the leucine residue at a position corresponding to position 240 of wild-type human Neu2 is substituted by aspartic acid (L240D), asparagine (L240N), or tyrosine (L240Y); (cc) the arginine residue at a position corresponding to position 241 of wild-type human Neu2 is substituted by alanine (R241A), aspartic acid (R241D), leucine (R241L), glutamine (R241Q). or tyrosine (R241Y); (dd) the alanine residue at a position corresponding to position 242 of wild-type human Neu2 is substituted by cysteine (A242C), phenylalanine (A242F), glycine (A242G), histidine (A242H), isoleucine (A242I), lysine (A242K), leucine (A242L), methionine (A242M), asparagine (A242N), glutamine (A242Q), arginine (A242R), serine (A242S), valine (A242V), tryptophan (A242W), or tyrosine (A242Y); (ee) the valine residue at a position corresponding to position 244 of wild-type human Neu2 is substituted by isoleucine (V244I), lysine (V244K), or proline (V244P); (ff) the glutamic acid residue at a position corresponding to position 257 of wild-type human Neu2 is substituted by proline (E257P); (gg) the serine residue at a position corresponding to position 258 is substituted by cysteine (S258C); (hh) the leucine residue at a position corresponding to position 260 of wild-type human Neu2 is substituted by aspartic acid (L260D), phenylalanine (L260F), glutamine (L260Q), or threonine (L260T); (ii) the valine residue at a position corresponding to position 265 of wild-type human Neu2 is substituted by phenylalanine (V265F); (jj) the glutamine residue at a position corresponding to position 270 of wild-type human Neu2 is substituted by alanine (Q270A), histidine (Q270H), phenylalanine (Q270F), proline (Q270P), serine (Q270S), or threonine (Q270T); (kk) the tryptophan residue at a position corresponding to position 292 of wild-type human Neu2 is substituted by arginine (W292R); (ll) the serine residue at a position corresponding to position 301 of wild-type human Neu2 is substituted by alanine (S301A), aspartic acid (S301D), glutamic acid (S301E), phenylalanine (S301F), glycine (S301G), histidine (S301H), isoleucine (S301I), lysine (S301K), leucine (S301L), methionine (S301M), asparagine (S301N), proline (S301P), glutamine (S301Q), arginine (S301R), threonine (S301T), valine (S301V), tryptophan (S301W), or tyrosine (S301Y)); (mm) the tryptophan residue at a position corresponding to position 302 of wild-type human Neu2 is substituted by alanine (W302A), aspartic acid (W302D), glutamic acid (W302E), phenylalanine (W302F), glycine (W302G), histidine (W302H), isoleucine (W3021), lysine (W302K), leucine (W302L), methionine (W302M), asparagine (W302N), proline (W302P), glutamine (W302Q), arginine (W302R), serine (W302S), threonine (W302T), valine (W302V), or tyrosine (W302Y); (nn) the valine residue at a position corresponding to position 363 of wild-type human Neu2 is substituted by arginine (V363R); or (oo) the leucine residue at a position corresponding to position 365 of wild-type human Neu2 is substituted by glutamine (L365Q), histidine (L365H), isoleucine (L365I), lysine (L365K) or serine (L365S); or the sialidase comprises a combination of any of the foregoing substitutions. For example, the sialidase may comprise a substitution selected from K9D, P62G, P62N, P62S, P62T, D80P, A93E, Q126H, Q126Y, R189P, H239P, A242T, Q270A, Q270S, Q270T, S301A, S301R, W302K, W302R, V363R, and L365I, or a combination of any of the foregoing substitutions.

[0161] In certain embodiments, the recombinant mutant human sialidase comprises a deletion of a leucine residue at a position corresponding to position 184 of wild-type human Neu2 (ΔL184), a deletion of a histidine residue at a position corresponding to position 185 of wild-type human Neu2 (ΔH185), a deletion of a proline residue at a position corresponding to position 186 of wild-type human Neu2 (ΔP186), a deletion of an isoleucine residue at a position corresponding to position 187 of wild-type human Neu2 (ΔI187), and a deletion of a glutamine residue at a position corresponding to position 184 of wild-type human Neu2 (ΔQ188), or a combination of any of the foregoing deletions.

[0162] In certain embodiments, the recombinant mutant human sialidase comprises an insertion between a threonine residue at a position corresponding to position 216 of wild-type human Neu2 and a leucine residue at a position corresponding to position 217 of wild-type human Neu2, for example, an insertion of an amino acid selected from S, T, Y, L, F, A, P, V, I, N, D, and H.

[0163] Additional exemplary sialidase mutations, and combinations of sialidase mutations, are described in International (PCT) Patent Application No. PCT/US2019/012207, filed Jan. 3, 2019, including in the Detailed Description in the section entitled “I. Recombinant Human Sialidases,” and in the Examples in Examples 1, 2, 3, 4, 5, and 6.

[0164] v. Combinations of Substitutions

[0165] The invention further provides a recombinant mutant human sialidase comprising a combination of any of the mutations contemplated herein. For example, the recombinant mutant sialidase enzyme may comprise a combination of 2, 3, 4, 5, 6, 7, 8, 9, 10, 11, 12, 13, 14, 15 or more of the mutations contemplated herein. It is contemplated that the recombinant mutant sialidase enzyme may comprise 1-15, 1-10, 1-7, 1-6, 1-5, 1-4, 1-3, 1-2, 2-15, 2-10, 2-7, 2-6, 2-5, 2-4, 2-3, 3-15, 3-10, 3-7, 3-6, 3-5, or 3-4 of the mutations contemplated herein.

[0166] For example, the recombinant mutant sialidase enzyme may comprise a M1 deletion (ΔM1), M1A substitution, M1D substitution, V6Y substitution, K9D substitution, P62G substitution, P62N substitution, P62S substitution, P62T substitution, A93E substitution, I187K substitution, Q270A substitution, S301R substitution, W302K substitution, C332A substitution, V363R substitution, L365I substitution, or a combination of any of the foregoing.

[0167] In certain embodiments, the recombinant mutant sialidase enzyme comprises a M1 deletion (ΔM1), M1A substitution, M1D substitution, V6Y substitution, I187K substitution, C332A substitution, or a combination of any of the foregoing. For example, the recombinant mutant sialidase enzyme may comprise a combination of mutations selected from: M1A and V6Y; M1A and I187K; M1A and C332A; M1D and V6Y; M1D and I187K; M1D and C332A; ΔM1 and V6Y; ΔM1 and I187K; ΔM1 and C332A; V6Y and I187K; V6Y and C332A; I187K and C332A; M1A, V6Y, and I187K; M1A, V6Y, and C332A; M1A, I187K, and C332A; M1D, V6Y, and I187K; M1D, V6Y, and C332A; M1D, I187K, and C332A; ΔM1, V6Y, and I187K; ΔM1, V6Y, and C332A; ΔM1, I187K, and C332A; V6Y, I187K, and C332A; M1A, V6Y, I187K, and C332A; M1D, V6Y, I187K, and C332A; and ΔM1, V6Y, I187K, and C332A.

[0168] In certain embodiments, the recombinant mutant sialidase enzyme comprises (i) an amino acid substitution identified in TABLE 8, or a combination of any amino acid substitution identified in TABLE 8, and (ii) a substitution a M1 deletion (ΔM1), M1A substitution, M1D substitution, V6Y substitution, I187K substitution, C332A substitution, or a combination of any of the foregoing. For example, the recombinant mutant sialidase enzyme may comprise (i) an amino acid substitution identified in TABLE 8, or a combination of any amino acid substitution identified in TABLE 8, and (ii) a combination of mutations selected from: M1A and V6Y; M1A and I187K; M1A and C332A; M1D and V6Y; M1D and I187K; M1D and C332A; ΔM1 and V6Y; ΔM1 and I187K; ΔM1 and C332A; V6Y and I187K; V6Y and C332A; I187K and C332A; M1A, V6Y, and I187K; M1A, V6Y, and C332A; M1A, I187K, and C332A; M1D, V6Y, and I187K; M1D, V6Y, and C332A; M1D, I187K, and C332A; ΔM1, V6Y, and I187K; ΔM1, V6Y, and C332A; ΔM1, I187K, and C332A; V6Y, I187K, and C332A; M1A, V6Y, I187K, and C332A; M1D, V6Y, I187K, and C332A; and ΔM1, V6Y, I187K, and C332A.

[0169] In certain embodiments, the recombinant mutant sialidase enzyme comprises: (a) the M1D, V6Y, P62G, A93E, I187K, and C332A substitutions; (b) the M1D, V6Y, K9D, A93E, I187K, C332A, V363R, and L365I substitutions; (c) the M1D, V6Y, P62N, I187K, and C332A substitutions; (d) the M1D, V6Y, I187K, Q270A, S301R, W302K, and C332A substitutions; (e) the M1D, V6Y, P62S, I187K, Q270A, S301R, W302K, and C332A substitutions; (f) the M1D, V6Y, P62T, I187K, Q270A, S301R, W302K, and C332A substitutions; (g) the M1D, V6Y, P62N, I187K, Q270A, S301R, W302K, and C332A substitutions; (h) the M1D, V6Y, P62G, A93E, I187K, S301A, W302R, and C332A substitutions; (i) the M1D, V6Y, P62G, A93E, Q126Y, I187K, Q270T, and C332A substitutions; or (j) the M1D, V6Y, P62G, A93E, Q126Y, I187K, and C332A substitutions; or (k) the M1D, V6Y, P62G, A93E, Q126Y, I187K, A242F, Q270T, and C332A substitutions.

[0170] In certain embodiments, the recombinant mutant human sialidase comprises a substitution of a serine residue at a position corresponding to position 301 of wild-type human Neu2 (S301) in combination with a substitution of a tryptophan residue at a position corresponding to position 302 of wild-type human Neu2 (W302). For example, the recombinant mutant human sialidase may comprise a combination of substitutions corresponding to a combination of substitutions listed in a row of TABLE 8 (amino acid positions corresponding to wild-type human Neu2 (SEQ ID NO: 1)). For example, the recombinant mutant human sialidase may comprise: the S301K and W302R substitutions; the S301K and W302K substitutions; or the S301A and W302S substitutions.

TABLE 8
Substitutions
S301 A, W302R
S301A, W302S
S301A, W302T
S301K, W302S
S301N, W302S
S301T, W302S
S301T, W302T
S301T, W302R
S301A, W302A
S301K, W302R
S301K, W302T
S301N, W302T
S301K, W302K
S301P, W302R
S301P, W302S
S301P, W302T

[0171] In certain embodiments, the recombinant mutant human sialidase comprises a combination of substitutions corresponding to a combination of substitutions listed in a row of TABLE 9 (amino acid positions corresponding to wild-type human Neu2 (SEQ ID NO: 1)).

TABLE 9
Substitutions
M1D, V6Y, P62G, I187K, C332A
M1D, V6Y, K9D, I187K, C332A, V363R, L365I
M1D, V6Y, P62G, A93E, I187K, C332A
M1D, V6Y, K9D, I187K, C332A, V363R, L365K
M1D, V6Y, K9D, I187K, C332A, V363R, L365S
M1D, V6Y, K9D, I187K, C332A, V363R, L365Q
M1D, V6Y, K9D, I187K, C332A, V363R, L365H
M1D, V6Y, A93K, I187K, C332A
M1D, V6Y, A93E, I187K, C332A
V6Y, I187K, W292R
V6Y, G107D, I187K
V6Y, C125L
C125L, I187K
V6Y, C125L, I187K
M1D, V6Y, K45A, I187K, C332A
M1D, V6Y, Q270A, I187K, C332A
M1D, V6Y, K44R, K45R, I187K, C332A
M1D, V6Y, Q112R, I187K, C332A
M1D, V6Y, Q270F, I187K, C332A
M1D, V6Y, I187K, S301R, W302K, C332A
M1D, V6Y, K44E, K45E, I187K, C332A
M1D, V6Y, I187K, L217V, C332A
M1D, V6Y, I187K, L217A, C332A
M1D, V6Y, K44E, K45E, I187K, S301R, W302K, C332A
M1D, V6Y, Q112R, I187K, S301R, W302K, C332A
M1D, V6Y, I187K, Q270A, S301R, W302K, C332A
M1D, V6Y, K44E, K45E, Q112R, I187K, C332A
M1D, V6Y, K44E, K45E, I187K, Q270A, C332A
M1D, V6Y, K45A, I187K, Q270A, C332A
M1D, V6Y, I187K, Q270H, C332A
M1D, V6Y, I187K, Q270P, C332A
M1D, V6Y, Q112K, I187K, C332A
M1D, V6Y, P62S, I187K, Q270A, S301R, W302K, C332A
M1D, V6Y, P62T, I187K, Q270A, S301R, W302K, C332A
M1D, V6Y, P62N, I187K, Q270A, S301R, W302K, C332A
V6Y, P62H, I187K
V6Y, Q108H, I187K
M1D, V6Y, P62H, I187K, C332A
M1D, V6Y, P62G, I187K, C332A
V6Y, P62G, I187K
M1D, V6Y, P62H, I187K
M1D, V6Y, Q108H, I187K
M1D, V6Y, P62N, I187K, C332A
M1D, V6Y, P62D, I187K, C332A
M1D, V6Y, P62E, I187K, C332A
V6Y, C164G, I187K, T248A
V6Y, C164G, I187K
V6Y, Q126L, I187K D251G
V6Y, L54M, Q69H, R78K, A171G, I187K
V6Y, P62T, I187K
V6Y, Al 50V, I187K
P5H, V6Y, P62S, I187K
V6Y, C164G, I187K
Q126Y, Q170T
Q126Y, A242F, Q270T
M1D, V6Y, P62G, A93E, Q126E, I187K, C332A
M1D, V6Y, P62G, A93E, Q126I, I187K, C332A
M1D, V6Y, P62G, A93E, Q126L, I187K, C332A
M1D, V6Y, P62G, A93E, Q126Y, I187K, C332A
M1D, V6Y, P62G, A93E, Q126F, I187K, C332A
M1D, V6Y, P62G, A93E, Q126H, I187K, C332A
M1D, V6Y, P62G, A93E, I187K, Q270S, C332A
M1D, V6Y, P62G, A93E, I187K, Q270T, C332A
M1D, V6Y, P62G, A93E, Q126Y, I187K, Q270T, C332A
M1D, V6Y, P62G, A93E, Q126Y, I187K, A242F, Q270T, C332A
M1D, V6Y, P62G, D80P, A93E, I187K, C332A
M1D, V6Y, P62G, A93E, R170P, I187K, C332A
M1D, V6Y, P62G, A93E, I187K, Q188P, C332A
M1D, V6Y, P62G, A93E, I187K, R189P, C332A
M1D, V6Y, P62G, A93E, I187K, E225P, C332A
M1D, V6Y, P62G, A93E, I187K, H239P, C332A
M1D, V6Y, P62G, A93E, I187K, E257P, C332A
M1D, V6Y, P62G, A93E, I187K, S301A, C332A
M1D, V6Y, P62G, A93E, I187K, S301D, C332A
M1D, V6Y, P62G, A93E, I187K, S301E, C332A
M1D, V6Y, P62G, A93E, I187K, S301F, C332A
M1D, V6Y, P62G, A93E, I187K, S301H, C332A
M1D, V6Y, P62G, A93E, I187K, S301K, C332A
M1D, V6Y, P62G, A93E, I187K, S301L, C332A
M1D, V6Y, P62G, A93E, I187K, S301M, C332A
M1D, V6Y, P62G, A93E, I187K, S301N, C332A
M1D, V6Y, P62G, A93E, I187K, S301P, C332A
M1D, V6Y, P62G, A93E, I187K, S301Q, C332A
M1D, V6Y, P62G, A93E, I187K, S301R, C332A
M1D, V6Y, P62G, A93E, I187K, S301T, C332A
M1D, V6Y, P62G, A93E, I187K, S301V, C332A
M1D, V6Y, P62G, A93E, I187K, S301W, C332A
M1D, V6Y, P62G, A93E, I187K, S301Y, C332A
M1D, V6Y, P62G, A93E, I187K, W302A, C332A
M1D, V6Y, P62G, A93E, I187K, W302D, C332A
M1D, V6Y, P62G, A93E, I187K, W302F, C332A
M1D, V6Y, P62G, A93E, I187K, W302G, C332A
M1D, V6Y, P62G, A93E, I187K, W302H, C332A
M1D, V6Y, P62G, A93E, I187K, W302I, C332A
M1D, V6Y, P62G, A93E, I187K, W302L, C332A
M1D, V6Y, P62G, A93E, I187K, W302M, C332A
M1D, V6Y, P62G, A93E, I187K, W302N, C332A
M1D, V6Y, P62G, A93E, I187K, W302P, C332A
M1D, V6Y, P62G, A93E, I187K, W302Q, C332A
M1D, V6Y, P62G, A93E, I187K, W302R, C332A
M1D, V6Y, P62G, A93E, I187K, W302S, C332A
M1D, V6Y, P62G, A93E, I187K, W302T, C332A
M1D, V6Y, P62G, A93E, I187K, W302V, C332A
M1D, V6Y, P62G, A93E, I187K, W302Y, C332A
M1D, V6Y, P62G, A93E, I187K, S301A, W302A, C332A
M1D, V6Y, P62G, A93E, I187K, S301A, W302R, C332A
M1D, V6Y, P62G, A93E, I187K, S301A, W302S, C332A
M1D, V6Y, P62G, A93E, I187K, S301A, W302T, C332A
M1D, V6Y, P62G, A93E, I187K, S301K, W302S, C332A
M1D, V6Y, P62G, A93E, I187K, S301K, W302R, C332A
M1D, V6Y, P62G, A93E, I187K, S301K, W302T, C332A
M1D, V6Y, P62G, A93E, I187K, S301N, W302S, C332A
M1D, V6Y, P62G, A93E, I187K, S301N, W302T, C332A
M1D, V6Y, P62G, A93E, I187K, S301T, W302R, C332A
Q126Y, Q270T
Q126Y, A242F, Q270T

[0172] In certain embodiments, the recombinant mutant human sialidase comprises the amino acid sequence of any one of SEQ ID NOs: 48-62, 169-171, or 196 or an amino acid sequence that has at least 85%, 90%, 95%, 96%, 97%, 98%, or 99% sequence identity to any one of SEQ ID NOs: 48-62, 169-171, or 196.

[0173] In certain embodiments, the recombinant mutant human sialidase comprises the amino acid sequence of

(SEQ ID NO: 47)
X₁X₂SX₃X₄X₅LQX₆ESVFQSGAHAYRIPALLYLPGQQSLLAFAEQRAS
X₇X₈DEHAELIVX₉RRGDYDAX₁₀THQVQWX₁₁AQEVVAQAX₁₂LDGHR
SMNPCPLYDX₁₃QTGTLFLFFIAIPX₁₄X₁₅VTEX₁₆QQLQTRANVTRL
X₁₇X₁₈VTSTDHGRTWSSPRDLTDAAIGPX₁₉YREWSTFAVGPGHX₂₀L
QLHDRX₂₁RSLVVPAYAYRKLHPX₂₂QRPIPSAFX₂₃FLSHDHGRTWAR
GHFVAQDTX₂₄ECQVAEVETGEQRVVTLNARSHLRARVQAQSX₂₅NX₂₆
GLDFQX₂₇SQLVKKLVEPPPX₂₈GX₂₉QGSVISFPSPRSGPGSPAQX₃₀
LLYTHPTHX₃₁X₃₂QRADLGAYLNPRPPAPEAWSEPX₃₃LLAKGSX₃₄A
YSDLQSMGTGPDGSPLFGX₃₅LYEANDYEEIX₃₆FX₃₇MFTLKOAFPAE
YLPQ,

wherein X₁ is Ala, Arg, Asn, Asp, Gln, Glu, Gly, His, Leu, Lys, Met, Phe, Thr, Val, or not present, X₂ is Ala or Lys, X₃ is Asn or Leu, X₄ is Pro or His, X₅ is Phe, Trp, Tyr or Val, X₆ is Lys or Asp. X₇ is Lys, Arg, or Glu. X₈ is Lys, Ala, Arg, or Glu, X₉ is Leu or Met, X₁₀ is Pro, Asn, Asp, His, Glu, Gly, Ser or Thr, X₁₁ is Gln or His, X₁₂ is Arg or Lys, X₁₃ is Ala, Glu or Lys, X₁₄ is Gly or Asp, X₁₅ is Gln or His, X₁₆ is Gln, Arg, or Lys, X₁₇ is Ala, Cys, Ile, Ser, Val, or Leu, X₁₈ is Gln or Leu, X₁₉ is Ala or Val, X₂₀ is Cys or Gly, X₂₁ is Ala or Gly, X₂₂ is Arg, Ile, or Lys, X₂₃ is Ala, Cys, Leu, or Val, X₂₄ is Leu, Ala, or Val, X₂₅ is Thr or Ala, X₂₆ is Asp or Gly, X₂₇ is Glu or Lys, X₂₈ is Gln, Ala, His, Phe, or Pro, X₂₉ is Cys or Val, X₃₀ is Trp or Arg, X₃₁ is Ser or Arg, X₃₂ is Trp or Lys, X₃₃ is Lys or Val, X₃₄ is Ala, Cys, Ser, or Val, X₃₅ is Cys, Leu, or Val, X₃₆ is Val or Arg, and X₃₇ is Leu, Gln, His, Ile, Lys, or Ser, and the sialidase comprises at least one mutation relative to wild-type human Neu2 (SEQ ID NO: 1).

[0174] In certain embodiments, the recombinant mutant human sialidase comprises the amino acid sequence of

(SEQ ID NO: 46)
X₁ASLPX₂LQX₃ESVFQSGAHAYRIPALLYLPGQQSLLAFAEQRASKKD
EHAELIVLRRGDYDAX₄THQVQWQAQEVVAQARLDGHRSMNPCPLYDX₅
QTGTLFLFFIAIPGQVTEQQQLQTRANVTRLCQVTSTDHGRTWSSPRDL
TDAAIGPAYREWSTFAVGPGHCLQLHDRARSLWPAYAYRKLHPX₆QRPI
PSAFCFLSHDHGRTWARGHFVAQDTLECQVAEVETGEQRWTLNARSHLR
ARVQAQSTNDGLDFQESQLVKKLVEPPPX₇GCQGSVISFPSPRSGPGSP
AQWLLYTHPTHX₈X₉QRADLGAYLNPRPPAPEAWSEPVLLAKGSX₁₀AY
SDLQSMGTGPDGSPLFGCLYEANDYEEIX₁₁FX₁₂MFTLKQAFPAEYLP
Q,

wherein X₁ is Ala, Arg, Asn, Asp, Gln, Glu, Gly, His, Leu, Lys, Met, Phe, Thr, Val, or not present, X₂ is Phe, Trp, Tyr or Val, X₃ is Lys or Asp, X₄ is Pro, Asn, Asp, His, Glu, Gly, Ser or Thr, X₅ is Ala, Glu, or Lys, X₆ is Arg, Ile, or Lys, X₇ is Gln, Ala, His, Phe, or Pro, X₈ is Ser or Arg, X₉ is Trp or Lys, X₁₀ is Ala, Cys, Ser, or Val, X₁₁ is Val or Arg, and X₁₂ is Leu, Gln, His, Ile, Lys, or Ser, and the sialidase comprises at least one mutation relative to wild-type human Neu2 (SEQ ID NO: 1). In certain embodiments, X₁ is Ala, Asp, Met, or not present, X₂ is Tyr or Val, X₃ is Lys or Asp, X₄ is Pro, Asn, Gly, Ser or Thr, X₅ is Ala or Glu, X₆ is Ile or Lys, X₇ is Gln or Ala, X₈ is Ser or Arg, X₉ is Trp or Lys, X₁₀ is Ala or Cys, X₁₁ is Val or Arg, and X₁₂ is Leu or Ile.

[0175] In certain embodiments, the recombinant mutant human sialidase comprises the amino acid sequence of

(SEQ ID NO: 172)
X₁X₂SX₃X₄X₅LQX₆ESVFQSGAHAYRIPALLYLPGQQSLLAFAEQRAS
X₇X₈DEHAELIVX₉RRGDYDAX₁₀THQVQWX₁₁AQEVVAQAX₁₂LX₁₃G
HRSMNPCPLYDX₁₄QTGTLFLFFIAIPX₁₅X₁₆VTEX₁₇QQLQTRANVT
RLX₁₈X_{I9}VTSTDHGRTWSSPRDLTDAAIGPX₂₀YREWSTFAVGPGHX₂₁
LQLHDX₂₂X₂₃RSLVVPAYAYRKLHPX₂₄X₂₅X₂₆PIPSAFX₂₇FLSHD
HGRTWARGHFVX₂₈QDTX₂₉ECQVAEVX₃₀TGEQRVVTLNARSX₃₁X₃₂
X₃₃X₃₄RX₃₅QAQSX₃₆NX₃₇GLDFQX₃₈X₃₉QX₄₀VKKLX₄₁EPPPX₄₂
GX₄₃QGSVISFPSPRSGPGSPAQX₄₄LLYTHPTHX₄₅X₄₆QRADLGAYLN
PRPPAPEAWSEPX₄₇LLAKGSX₄₈AYSDLQSMGTGPDGSPLFGX₄₉LYEA
NDYEEIX₅₀FX₅₁MFTLKQAFPAEYLPQ,

wherein X₁ is Ala, Arg, Asn, Asp, Gln, Glu, Gly, His, Leu, Lys, Met, Phe, Thr, Val, or not present, X₂ is Ala or Lys, X₃ is Asn or Leu, X₄ is Pro or His, X₅ is Phe, Trp, Tyr or Val, X₆ is Lys or Asp, X₇ is Lys, Arg, or Glu, X₈ is Lys, Ala, Arg, or Glu, X₉ is Leu or Met, X₁₀ is Pro, Asn, Asp, His, Glu, Gly, Ser or Thr, X₁₁ is Gln or His, X₁₂ is Arg or Lys, X₁₃ is Asp or Pro, X₁₄ is Ala, Glu or Lys, X₁₅ is Gly or Asp, X₁₆ is Gln or His, X₁₇ is Gln, Arg, or Lys, X₁₈ is Ala, Cys, Ile, Ser, Val, or Leu, X₁₉ is Gln, Leu, Glu, Phe, His, Ile, Leu, or Tyr, X₂₀ is Ala or Val, X₂₁ is Cys or Gly, X₂₂ is Arg or Pro, X₂₃ is Ala or Gly, X₂₄ is Arg, Ile, or Lys, X₂₅ is Gln or Pro, X₂₆ is Arg or Pro, X₂₇ is Ala, Cys, Leu, or Val, X₂₈ is Ala, Cys, Asn, Ser, or Thr, X₂₉ is Leu, Ala, or Val, X₃₀ is Glu or Pro, X₃₁ is His or Pro, X₃₂ is Leu, Asp, Asn, or Tyr, X₃₃ is Arg, Ala, Asp, Leu, Gln, or Tyr, X₃₄ is Ala, Cys, Phe, Gly, His, Ile, Lys, Leu, Met, Asn, Gln, Arg, Ser, Val, Trp, or Tyr, X₃₅ is Val, Ile, or Lys, X₃₆ is Thr or Ala, X₃₇ is Asp or Gly, X₃₈ is Glu, Lys, or Pro, X₃₉ is Ser or Cys, X₄₀ is Leu, Asp, Phe, Gln, or Thr, X₄₁ is Val or Phe, X₄₂ is Gln, Ala, His, Phe, Pro, Ser, or Thr, X₄₃ is Cys or Val, X₄₄ is Trp or Arg, X₄₅ is Ser, Arg, Ala, Asp, Glu, Phe, Gly, His, Ile, Lys, Leu, Met, Asn, Pro, Gln, Thr, Val, Trp, or Tyr, X₄₆ is Trp, Lys, Ala, Asp, Glu, Phe, Gly, His, Ile, Lys, Leu, Met, Asn, Pro, Gln, Arg, Ser, Thr, Val, or Tyr, X₄₇ is Lys or Val, X₄₈ is Ala, Cys, Ser, or Val, X₄₉ is Cys, Leu, or Val, X₅₀ is Val or Arg, and X₅₁ is Leu, Gln, His, Ile, Lys, or Ser, and the sialidase comprises at least one mutation relative to wild-type human Neu2 (SEQ ID NO: 1).

[0176] In certain embodiments, the recombinant mutant human sialidase comprises the amino acid sequence of

(SEQ ID NO: 173)
X₁ASLPX₂LQX₃ESVFQSGAHAYRIPALLYLPGQQSLLAFAEQRASKKDE
HAELIVLRRGDYDAX₄THQVQWQAQEVVAQARLDGHRSMNPCPLYDX₅QT
GTLFLFFIAIPGQVTEQQQLQTRANVTRLCX₆VTSTDHGRTWSSPRDLTD
AAIGPAYREWSTFAVGPGHCLQLHDRARSLWPAYAYRKLHPX₇QRPIPSA
FCFLSHDHGRTWARGHFVAQDTLECQVAEVETGEQRWTLNARSHLRX₈RV
QAQSTNDGLDFQESQLVKKLVEPPPX₉GCQGSVISFPSPRSGPGSPAQWL
LYTHPTHX₁₀X₁₁QRADLGAYLNPRPPAPEAWSEPVLLAKGSX₁₂AYSDL
QSMGTGPDGSPLFGCLYEANDYEEIX₁₃FX₁₄MFTLKQAFPAEYLPQ,

wherein X₁ is Ala, Arg, Asn, Asp, Gln, Glu, Gly, His, Leu, Lys, Met, Phe, Thr, Val, or not present, X₂ is Phe, Trp, Tyr or Val, X₃ is Lys or Asp, X₄ is Pro, Asn, Asp, His, Glu, Gly, Ser or Thr, X₅ is Ala, Glu, or Lys, X₆ is Gln, Leu, Glu, Phe, His, Ile, Leu, or Tyr, X₇ is Arg, Ile, or Lys, X₈ is Ala, Cys, Phe, Gly, His, Ile, Lys, Leu, Met, Asn, Gln, Arg, Ser, Val, Trp, or Tyr, X₉ is Gln, Ala, His, Phe, Pro, Ser, or Thr, X₁₀ is Ser, Arg, Ala, Asp, Glu, Phe, Gly, His, Ile, Lys, Leu, Met, Asn, Pro, Gln, Thr, Val, Trp, or Tyr, X₁₁ is Trp, Lys, Ala, Asp, Glu, Phe, Gly, His, Ile, Lys, Leu, Met, Asn, Pro, Gln, Arg, Ser, Thr, Val, or Tyr, X₁₂ is Ala, Cys, Ser, or Val, X₁₃ is Val or Arg, and X₁₄ is Leu, Gln, His, Ile, Lys, or Ser, and the sialidase comprises at least one mutation relative to wild-type human Neu2 (SEQ ID NO: 1). In certain embodiments, X₁ is Ala, Asp, Met, or not present, X₂ is Tyr or Val, X₃ is Lys or Asp, X₄ is Pro, Asn, Gly, Ser or Thr, X₅ is Ala or Glu, X₆ is Gln or Tyr, X₇ is Ile or Lys, X₈ is Ala or Thr, X₉ is Gln, Ala, or Thr, X₁₀ is Ser, Arg, or Ala, X₁₁ is Trp, Lys, or Arg, X₁₂ is Ala or Cys, X₁₃ is Val or Arg, and X₁₄ is Leu or Ile.

[0177] In certain embodiments, the recombinant mutant human sialidase comprises a conservative substitution relative to a recombinant mutant human sialidase sequence disclosed herein. As used herein, the term “conservative substitution” refers to a substitution with a structurally similar amino acid. For example, conservative substitutions may include those within the following groups: Ser and Cys; Leu, Ile, and Val; Glu and Asp; Lys and Arg; Phe, Tyr, and Trp; and Gln, Asn, Glu, Asp, and His. Conservative substitutions may also be defined by the BLAST (Basic Local Alignment Search Tool) algorithm, the BLOSUM substitution matrix (e.g., BLOSUM 62 matrix), or the PAM substitution:p matrix (e.g., the PAM 250 matrix).

[0178] Sequence identity may be determined in various ways that are within the skill of a person skilled in the art, e.g., using publicly available computer software such as BLAST, BLAST-2, ALIGN or Megalign (DNASTAR) software. BLAST (Basic Local Alignment Search Tool) analysis using the algorithm employed by the programs blastp, blastn, blastx, tblastn and tblastx (Karlin et al., (1990) PROC. NATL. ACAD. SCI. USA 87:2264-2268; Altschul, (1993) J. MOL. EVOL. 36:290-300; Altschul et al., (1997) NUCLEIC ACIDS RES. 25:3389-3402, incorporated by reference herein) are tailored for sequence similarity searching. For a discussion of basic issues in searching sequence databases see Altschul et al., (1994) NATURE GENETICS 6:119-129, which is fully incorporated by reference herein. Those skilled in the art can determine appropriate parameters for measuring alignment, including any algorithms needed to achieve maximal alignment over the full length of the sequences being compared. The search parameters for histogram, descriptions, alignments, expect (i.e., the statistical significance threshold for reporting matches against database sequences), cutoff, matrix and filter are at the default settings. The default scoring matrix used by blastp, blastx, tblastn, and tblastx is the BLOSUM62 matrix (Henikoff et al., (1992) PROC. NATL. ACAD. SCI. USA 89:10915-10919, fully incorporated by reference herein). Four blastn parameters may be adjusted as follows: Q=10 (gap creation penalty); R=10 (gap extension penalty); wink=1 (generates word hits at every wink.sup.th position along the query); and gapw=16 (sets the window width within which gapped alignments are generated). The equivalent blastp parameter settings may be Q=9; R=2; wink=1; and gapw=32. Searches may also be conducted using the NCBI (National Center for Biotechnology Information) BLAST Advanced Option parameter (e.g.: -G, Cost to open gap [Integer]: default=5 for nucleotides/11 for proteins; -E, Cost to extend gap [Integer]: default=2 for nucleotides/1 for proteins; -q, Penalty for nucleotide mismatch [Integer]: default=−3; -r, reward for nucleotide match [Integer]: default=1; -e, expect value [Real]: default=10; —W, wordsize [Integer]: default=11 for nucleotides/28 for megablast/3 for proteins; -y, Dropoff (X) for blast extensions in bits: default=20 for blastn/7 for others; -X, X dropoff value for gapped alignment (in bits): default=15 for all programs, not applicable to blastn; and —Z, final X dropoff value for gapped alignment (in bits): 50 for blastn, 25 for others). ClustalW for pairwise protein alignments may also be used (default parameters may include, e.g., Blosum62 matrix and Gap Opening Penalty=10 and Gap Extension Penalty=0.1). A Bestfit comparison between sequences, available in the GCG package version 10.0, uses DNA parameters GAP=50 (gap creation penalty) and LEN=3 (gap extension penalty). The equivalent settings in Bestfit protein comparisons are GAP=8 and LEN=2.

### II. Serum Half-Life Extenders

[0179] As used herein, a “serum half-life extender” refers to a moiety that can be associated with a sialidase to extend its circulating half-life in the serum of a subject. In certain embodiments, a serum half-life extender can be selected from an Fc domain (see, e.g., Beck et al. (2011) MABS 4:1015-28), albumin (e.g., human serum albumin (HSA), see, Weimer et al. (2013) Recombinant albumin fusion proteins. In: Schmidt S, editor. Fusion protein technologies for biopharmaceuticals: applications and challenges. Hoboken: Wiley; 2013, p. 297-323), albumin binding domain (e.g., an HSA binder, see Walker et al. (2013) Albumin-binding fusion proteins in the development of novel long-acting therapeutics. In: Schmidt S, editor. Fusion protein technologies for biopharmaceuticals: applications and challenges. Hoboken: Wiley; 2013, p. 325-43), transferrin (see Kim et al. (2010) J PHARMACOL EXP THER 334:682-92), XTEN (also called recombinant PEG or “rPEG”, see Schellenberger et al. (2009) NAT. BIO IECHNOL. 27:1186-90), a homo-amino acid polymer (HAP, see Schlapschy et al. (2007) PROTEIN ENG DES SEL. 20:273-84)), a proline-alanine-serine polymer (PAS, see Schlapschy et al. (2013) PROTEIN ENG DES SEL. 26:489-501), an elastin-like peptide (ELP, see Floss et al. (2013) Fusion protein technologies for biopharmaceuticals: applications and challenges, p. 372-98), carboxy-terminal peptide (CTP, Duijkers et al. (2002) HUM REPROD. 17:1987-93)), gelatin-like protein (GLK, Huang et al. (2010) EUR J PHARM BIOPHARM 72:435-41), and a polyethylene glycol (PEG).

[0180] Suitable serum half-life extenders also include a variety of polymers, such as those described in U.S. Pat. No. 7,842,789. For example, block copolymers of polyoxyethylene and polyoxypropylene (Pluronics); polymethacrylates; carbomers; and branched or unbranched polysaccharides which comprise the saccharide monomers such as D-mannose, D- and L-galactose, fucose, fructose, D-xylose, L-arabinose, and D-glucuronic acid can be used. In other embodiments, the serum half-life extender can be a hydrophilic polyvinyl polymer such as polyvinyl alcohol and polyvinylpyrrolidone (PVP)-type polymers. The serum half-life extender can be a functionalized polyvinylpyrrolidone, for example, carboxy or amine functionalized on one (or both) ends of the polymer (as available from PolymerSource). Alternatively, the serum half-life extender can include Poly N-(2-hydroxypropyl)methacrylamide (HPMA), or functionalized HPMA (amine, carboxy, etc.), Poly(N-isopropylacrylamide) or functionalized poly(N-isopropylacrylamide).

[0181] In one embodiment, a sialidase is covalently attached to a naturally long-half-life polypeptide or protein such as an Fc domain (Beck et al., supra), transferrin (Kim et al., supra), or albumin (Weimer et al., supra) to form a fusion protein, either by genetic fusion (i.e., production of recombinant fusion protein) or by chemical conjugation.

[0182] In another embodiment, a sialidase is covalently attached to an inert polypeptide such as an XTEN (also called recombinant PEG or “rPEG”, see Schellenberger, supra), a homo amino acid polymer (HAP, see Schlapschy et al. (2007), supra), a proline-alanine-serine-polymer (PAS, see Schlapschy et al., (2013), supra), an elastin-like peptide (ELP, see Floss et al., supra), or gelatin-like protein (GLK, Huang et al., supra) to form a fusion protein, either by genetic fusion (i.e., production of recombinant fusion protein) or by chemical conjugation. Inert polypeptides function, among other things, to increase the size and hydrodynamic radius of the sialidase, thereby to extend half-life. In certain embodiments, an XTEN polypeptide has a length from about 25 amino acids to about 1500 amino acids (e.g., from about 25 amino acids to about 100 amino acids, from about 25 amino acids to about 250 amino acids, from about 25 amino acids to about 500 amino acids, from about 25 amino acids to about 750 amino acids, from about 25 amino acids to about 1000 amino acids, from about 25 amino acids to about 1250 amino acids, from about 100 amino acids to about 250 amino acids, from about 100 amino acids to about 250 amino acids, from about 100 amino acids to about 500 amino acids, from about 100 amino acids to about 750 amino acids, from about 100 amino acids to about 1000 amino acids, from about 100 amino acids to about 1250 amino acids, from about 100 amino acids to about 1500 amino acids, from about 250 amino acids to about 1250 amino acids, from about 250 amino acids to about 1000 amino acids, from about 250 amino acids to about 750 amino acids, from about 250 amino acids to about 500 amino acids, from about 500 amino acids to about 750 amino acids, from about 500 amino acids to about 1000 amino acids, from about 500 amino acids to about 1250 amino acids, from about 500 amino acids to about 1500 amino acids, from about 750 amino acids to about 1000 amino acids, from about 750 amino acids to about 1250 amino acids, from about 750 amino acids to about 1500 amino acids, from about 1000 amino acids to about 1250 amino acids, from about 1000 amino acids to about 1500 amino acids, or from about 1250 amino acids to about 1500 amino acids.

[0183] In certain embodiments, a sialidase is chemically conjugated to a repeat chemical moiety such as PEG or hyaluronic acid (see, Mero et al. (2013) CARB POLYMERS 92:2163-70), which increases the hydrodynamic radius of the sialidase thereby to extend half-life.

[0184] In another embodiment, a sialidase is itself polysialylated or covalently attached to a negatively charged, highly sialylated protein (e.g., carboxy-terminal peptide (CTP), of chorionic gonadotropin (CG) β-chain, see, Duijkers et al. (2002) HUM REPROD 17:1987-93).

[0185] Methods for making and using the foregoing serum half-life extenders are known in the art. See also, e.g., Strohl (2015) BIODRUGS 29:215-239.

[0186] In certain embodiments, the sialidase is conjugated to a serum half-life extender that is not and Fc domain and/or is not PEG.

[0187] It is contemplated that one or more sialidases may be covalently bound to one or more (for example, 2, 3, 4, 5, 6, 8, 9, 10 or more) serum half-life extenders.

[0188] In certain embodiments, the serum half-life of the sialidase enzyme conjugated to a serum half-life enhancer is at least 24, 36, 48, or 60 hours.

[0189] In general, the serum half-life extender may have a molecular weight from about 2 kDa to about 5 kDa, from about 2 kDa to about 10 kDa, from about 2 kDa to about 20 kDa, from about 2 kDa to about 30 kDa, from about 2 kDa to about 40 kDa, from about 2 kDa to about 50 kDa, from about 2 kDa to about 60 kDa, from about 2 kDa to about 70 kDa, from about 2 kDa to about 80 kDa, from about 2 kDa to about 90 kDa, from about 2 kDa to about 100 kDa, from about 2 kDa to about 150 kDa, from about 5 kDa to about 10 kDa, from about 5 kDa to about 20 kDa, from about 5 kDa to about 30 kDa, from about 5 kDa to about 40 kDa, from about 5 kDa to about 50 kDa, from about 5 kDa to about 60 kDa, from about 5 kDa to about 70 kDa, from about 5 kDa to about 80 kDa, from about 5 kDa to about 90 kDa, from about 5 kDa to about 100 kDa, from about 5 kDa to about 150 kDa, from about 10 kDa to about 20 kDa, from about 10 kDa to about 30 kDa, from about 10 kDa to about 40 kDa, from about 10 kDa to about 50 kDa, from about 10 kDa to about 60 kDa, from about 10 kDa to about 70 kDa, from about 10 kDa to about 80 kDa, from about 10 kDa to about 90 kDa, from about 10 kDa to about 100 kDa, from about 10 kDa to about 150 kDa, from about 20 kDa to about 30 kDa, from about 20 kDa to about 40 kDa, from about 20 kDa to about 50 kDa, from about 20 kDa to about 60 kDa, from about 20 kDa to about 70 kDa, from about 20 kDa to about 80 kDa, from about 20 kDa to about 90 kDa, from about 20 kDa to about 100 kDa, from about 20 kDa to about 150 kDa, from about 30 kDa to about 40 kDa, from about 30 kDa to about 50 kDa, from about 30 kDa to about 60 kDa, from about 30 kDa to about 70 kDa, from about 30 kDa to about 80 kDa, from about 30 kDa to about 90 kDa, from about 30 kDa to about 100 kDa, from about 30 kDa to about 150 kDa, from about 40 kDa to about 50 kDa, from about 40 kDa to about 60 kDa, from about 40 kDa to about 70 kDa, from about 40 kDa to about 80 kDa, from about 40 kDa to about 90 kDa, from about 40 kDa to about 100 kDa, from about 40 kDa to about 150 kDa, from about 50 kDa to about 60 kDa, from about 50 kDa to about 70 kDa, from about 50 kDa to about 80 kDa, from about 50 kDa to about 90 kDa, from about 50 kDa to about 100 kDa, from about 50 kDa to about 150 kDa, from about 60 kDa to about 70 kDa, from about 60 kDa to about 80 kDa, from about 60 kDa to about 90 kDa, from about 60 kDa to about 100 kDa, from about 60 kDa to about 150 kDa, from about 70 kDa to about 80 kDa, from about 70 kDa to about 90 kDa, from about 70 kDa to about 100 kDa, from about 70 kDa to about 150 kDa, from about 80 kDa to about 90 kDa, from about 80 kDa to about 100 kDa, from about 80 kDa to about 150 kDa, from about 90 kDa to about 100 kDa, from about 90 kDa to about 150 kDa, or from about 100 kDa to about 150 kDa.

[0190] a. Fc Domains

[0191] In certain embodiments, the fusion protein comprises an immunoglobulin Fc domain. As used herein, unless otherwise indicated, the term “immunoglobulin Fc domain” or “Fe domain” or “Fe” refers to a fragment of an immunoglobulin heavy chain constant region which, either alone or in combination with a second immunoglobulin Fc domain, or unconjugated or conjugated to a sialidase, is capable of binding to an Fc receptor. An immunoglobulin Fc domain may include, e.g., immunoglobulin CH2 and CH3 domains. An immunoglobulin Fc domain may include, e.g., immunoglobulin CH2 and CH3 domains and an immunoglobulin hinge region. Boundaries between immunoglobulin hinge regions, CH2, and CH3 domains are well known in the art, and can be found, e.g., in the PROSITE database (available on the world wide web at prosite.expasy.org).

[0192] FIGS. 1A-E depict certain embodiments of sialidase-Fc fusion constructs comprising a first polypeptide comprising a first immunoglobulin Fc domain, and a second polypeptide comprising a second immunoglobulin Fc domain. The first and second polypeptides can be covalently linked together. The covalent linkages can be disulfide bonds. A sialidase enzyme can be conjugated to the N- or C-terminus of the first immunoglobulin Fc domain or to the N- or C-terminus of the second immunoglobulin Fc domain. An optional second sialidase enzyme can be conjugated to the N- or C-terminus of the first immunoglobulin Fc domain or to the N- or C-terminus of the second immunoglobulin Fc domain.

[0193] FIG. 1A shows a construct having two Fc domains and a sialidase enzyme conjugated to the N-terminus of each Fc domain. FIG. 1B shows a construct having two Fc domains and a sialidase enzyme conjugated to the C-terminus of the first Fc domain and the N-terminus of the second Fc domain. FIG. 1C shows a construct having two Fc domains and a sialidase enzyme conjugated to the N-terminus of the second Fc domain. FIG. 1D shows a construct having two Fc domains and a sialidase enzyme conjugated to the C-terminus of the first Fc domain. FIG. 1E shows a construct having two Fc domains and a sialidase enzyme conjugated to the C-terminus of the each Fc domain. It is understood that the Fc domains can be naturally occurring Fc domains or engineered Fc domains containing modifications, such as, point mutations in each polypeptide chain that facilitates a knob into hole configuration, or to provide a modified Fc domain functionality.

[0194] In certain embodiments, the immunoglobulin Fc domain is derived from a human IgG1, IgG2, IgG3, IgG4, IgA1, IgA2, IgD, IgE, and IgM Fc domain. A single amino acid substitution (S228P according to Kabat numbering; designated IgG4Pro) may be introduced to abolish the heterogeneity observed in recombinant IgG4 antibody. See Angal, S. et al. (1993) MOL. IMMUNOL. 30:105-108.

[0195] In certain embodiments, the immunoglobulin Fc domain is derived from a human IgG1 isotype or another isotype that elicits antibody-dependent cell-mediated cytotoxicity (ADCC) and/or complement mediated cytotoxicity (CDC). In certain embodiments, the immunoglobulin Fc domain is derived from a human IgG1 isotype (e.g., SEQ ID NO: 31 or SEQ ID NO: 69).

[0196] In certain embodiments, the immunoglobulin Fc domain is derived from a human IgG4 isotype or another isotype that elicits little or no antibody-dependent cell-mediated cytotoxicity (ADCC) and/or complement mediated cytotoxicity (CDC). In certain embodiments, the immunoglobulin Fc domain is derived from a human IgG4 isotype.

[0197] In certain embodiments, the immunoglobulin Fc domain comprises either a “knob” mutation, e.g., T366Y or a “hole” mutation, e.g., Y407T for heterodimerization with a second polypeptide (residue numbers according to EU numbering, Kabat, E. A., et al. (1991) SEQUENCES OF PROTEINS OF IMMUNOLOGICAL INTEREST, FIFTH EDITION, U.S. Department of Health and Human Services, NIH Publication No. 91-3242). In certain embodiments comprising a sialidase-Fc fusion with two Fc domains, the first Fc domain can comprises a “knob” mutation (such as SEQ ID NO: 33 and SEQ ID NO: 148) and the second Fc domain can comprise a “hole” mutation (such as SEQ ID NO: 32 and SEQ ID NO: 147).

[0198] In certain embodiments, a sialidase-Fc fusion protein comprises the amino acid sequence of any one of SEQ ID NOs: 129-158, 177-192, and 197-200, or an amino acid sequence that has at least 85%, 90%, 95%, 96%, 97%, 98%, or 99% sequence identity to any one of SEQ ID NOs: 129-158, 177-192, and 197-200.

[0199] In certain embodiments, the sialidase-Fc fusion protein comprises the amino acid sequence of

(SEQ ID NO: 159)
X₁X₂SX₃X₄X₅LQX₆ESVFQSGAHAYRIPALLYLPGQQSLLAFAEQRAS
X₇X₈DEHAELIVX₉RRGDYDAX₁₀THQVQWX₁₁AQEVVAQAX₁₂LDGHRS
MNPCPLYDX₁₃QTGTLFLFFIAIPX₁₄X₁₅VTEX₁₆QQLQTRANVTRL
X₁₇X₁₈VTSTDHGRTWSSPRDLTDAAIGPX₁₉YREWSTFAVGPGHX₂₀LQ
LHDRX₂₁RSLVVPAYAYRKLHPX₂₂QRPIPSAFX₂₃FLSHDHGRTWARGH
FVAQDTX₂₄ECQVAEVETGEQRVVTLNARSHLRARVQAQSX₂₅NX₂₆GLD
FQX₂₇SQLVKKLVEPPPX₂₈GX₂₉QGSVISFPSPRSGPGSPAQX₃₀LLYT
HPTHX₃₁X₃₂QRADLGAYLNPRPPAPEAWSEPX₃₃LLAKGSX₃₄AYSDLQ
SMGTGPDGSPLFGX₃₅LYEANDYEEIX₃₆FX₃₇MFTLKQAFPAEYLPQGG
GGSGGGGSDKTHTCPPCPAPELLGGPSVFLFPPKPKDTLMISRTPEVTCV
VVDVSHEDPEVKFNWYVDGVEVHNAKTKPREEQYNSTYRVVSVLTVLHQD
WLNGKEYKCKVSNKALPAPIEKTISKAKGQPREPQVYTLPPSREEMTKNQ
VSLTCLVKGFYPSDIAVEWESNGQPENNYKTTPPVLDSDGSFFLTSKLTV
DKSRWQQGNVFSCSVMHEALHNHYTQKSLSLSPGK,

wherein X₁ is Ala, Arg, Asn, Asp, Gln, Glu, Gly, His, Leu, Lys, Met, Phe, Thr, Val, or not present, X₂ is Ala or Lys, X₃ is Asn or Leu, X₄ is Pro or His, X₅ is Phe, Trp, Tyr or Val, X₆ is Lys or Asp. X₇ is Lys, Arg, or Glu. X₈ is Lys, Ala, Arg, or Glu, X₉ is Leu or Met, X₁₀ is Pro, Asn, Asp, His, Glu, Gly, Ser or Thr, X₁₁ is Gln or His, X₁₂ is Arg or Lys, X₁₃ is Ala, Glu or Lys, X₁₄ is Gly or Asp, X₁₅ is Gln or His, X₁₆ is Gln, Arg, or Lys, X₁₇ is Ala, Cys, Ile, Ser, Val, or Leu, X₁₈ is Gln or Leu, X₁₉ is Ala or Val, X₂₀ is Cys or Gly, X₂₁ is Ala or Gly, X₂₂ is Arg, Ile, or Lys, X₂₃ is Ala, Cys, Leu, or Val, X₂₄ is Leu, Ala, or Val, X₂₅ is Thr or Ala, X₂₆ is Asp or Gly, X₂₇ is Glu or Lys, X₂₈ is Gln, Ala, His, Phe, or Pro, X₂₉ is Cys or Val, X₃₀ is Trp or Arg, X₃₁ is Ser or Arg, X₃₂ is Trp or Lys, X₃₃ is Lys or Val, X₃₄ is Ala, Cys, Ser, or Val, X₃₅ is Cys, Leu, or Val, X₃₆ is Val or Arg, and X₃₇ is Leu, Gln, His, Ile, Lys, or Ser, and the sialidase comprises at least one mutation relative to wild-type human Neu2 (SEQ ID NO: 1).

[0200] In certain embodiments, the sialidase-Fc fusion protein comprises the amino acid sequence of

(SEQ ID NO: 160)
X₁ASLPX₂LQX₃ESVFQSGAHAYRIPALLYLPGQQSLLAFAEQRASKKDE
HAELIVLRRGDYDAX₄THQVQWQAQEVVAQARLDGHRSMNPCPLYDX₅QT
GTLFLFFIAIPGQVTEQQQLQTRANVTRLCQVTSTDHGRTWSSPRDLTDA
AIGPAYREWSTFAVGPGHCLQLHDRARSLVVPAYAYRKLHPX₆QRPIPSA
CFLSHDHGRTWARGHFVAQDTLECQVAEVETGEQRVVTLNARSHLRARVQ
FAQSTNDGLDFQESQLVKKLVEPPPX₇GCQGSVISFPSPRSGPGSPAQWL
LYTHPTHX₈X₉QRADLGAYLNPRPPAPEAWSEPVLLAKGSX₁₀AYSDLQS
MGTGPDGSPLFGCLYEANDYEEIX₁₁FX₁₂MFTLKQAFPAEYLPQGGGGS
GGGSDKTHTCPPCPAPELLGGPSVFLFPPKPKDTLMISRTPEVTCVVVD
VSHEDPEVKFNWYVDGVEVHNAKTKPREEQYNSTYRVVSVLTVLHQDWLN
GKEYKCKVSNKALPAPIEKTISKAKGQPREPQVYTLPPSREEMTKNQVSL
TCLVKGFYPSDIAVEWESNGQPENNYKTTPPVLDSDGSFFLTSKLTVDKS
RWQQGNVFSCSVMHEALHNHYTQKSLSLSPGK,

wherein X₁ is Ala, Arg, Asn, Asp, Gln, Glu, Gly, His, Leu, Lys, Met, Phe, Thr, Val, or not present, X₂ is Phe, Trp, Tyr or Val, X₃ is Lys or Asp, X₄ is Pro, Asn, Asp, His, Glu, Gly, Ser or Thr, X₅ is Ala, Glu, or Lys, X₆ is Arg, Ile, or Lys, X₇ is Gln, Ala, His, Phe, or Pro, X₈ is Ser or Arg, X₉ is Trp or Lys, X₁₀ is Ala, Cys, Ser, or Val, X₁₁ is Val or Arg, and X₁₂ is Leu, Gln, His, Ile, Lys, or Ser, and the sialidase comprises at least one mutation relative to wild-type human Neu2 (SEQ ID NO: 1). In certain embodiments, X₁ is Ala, Asp, Met, or not present, X₂ is Tyr or Val, X₃ is Lys or Asp, X₄ is Pro, Asn, Gly, Ser or Thr, X₅ is Ala or Glu, X₆ is Ile or Lys, X₇ is Gln or Ala, X₈ is Ser or Arg, X₉ is Trp or Lys, X₁₀ is Ala or Cys, X₁₁ is Val or Arg, and X₁₂ is Leu or Ile.

[0201] In certain embodiments, the sialidase-Fc fusion protein comprises the amino acid sequence of

(SEQ ID NO: 161)
X₁X₂SX₃X₄X₅LQX₆ESVFQSGAHAYRIPALLYLPGQQSLLAFAEQRAS
X₇X₈DEHAELIVX₉RRGDYDAX₁₀THQVQWX₁₁AQEVVAQAX₁₂LDGHRS
MNPCPLYDX₁₃QTGTLFLFFIAIPX₁₄X₁₅VTEX₁₆QQLQTRANVTRL
X₁₇X₁₈VTSTDHGRTWSSPRDLTDAAIGPX₁₉YREWSTFAVGPGHX₂₀LQ
LHDRX₂₁RSLVVPAYAYRKLHPX₂₂QRPIPSAFX₂₃FLSHDHGRTWARGH
FVAQDTX₂₄ECQVAEVETGEQRVVTLNARSHLRARVQAQSX₂₅NX₂₆GLD
FQX₂₇SQLVKKLVEPPPX₂₈GX₂₉QGSVISFPSPRSGPGSPAQX₃₀LLYTH
PTHX₃₁X₃₂QRADLGAYLNPRPPAPEAWSEPX₃₃LLAKGSX₃₄AYSDLQS
MGTGPDGSPLFGX₃₅LYEANDYEEIX₃₆FX₃₇MFTLKQAFPAEYLPQX₃₈
DKTHTCPPCPAPELLGGPSVFLFPPKPKDTLMISRTPEVTCVVVDVSHED
PEVKFNWYVDGVEVHNAKTKPREEQYNSTYRVVSVLTVLHQDWLNGKEYK
CKVSNKALPAPIEKTISKAKGQPREPQVYTLPPSREEMTKNQVSLTCLVK
GFYPSDIAVEWESNGQPENNYKTTPPVLDSDGSFFLTSKLTVDKSRWQQG
NVFSCSVMHEALHNHYTQKSLSLSPGK,

wherein X₁ is Ala, Arg, Asn, Asp, Gln, Glu, Gly, His, Leu, Lys, Met, Phe, Thr, Val, or not present, X₂ is Ala or Lys, X₃ is Asn or Leu, X₄ is Pro or His, X₅ is Phe, Trp, Tyr or Val, X₆ is Lys or Asp. X₇ is Lys, Arg, or Glu. X₈ is Lys, Ala, Arg, or Glu, X₉ is Leu or Met, X₁₀ is Pro, Asn, Asp, His, Glu, Gly, Ser or Thr, X₁₁ is Gln or His, X₁₂ is Arg or Lys, X₁₃ is Ala, Glu or Lys, X₁₄ is Gly or Asp, X₁₅ is Gln or His, X₁₆ is Gln, Arg, or Lys, X₁₇ is Ala, Cys, Ile, Ser, Val, or Leu, X₁₈ is Gln or Leu, X₁₉ is Ala or Val, X₂₀ is Cys or Gly, X₂₁ is Ala or Gly, X₂₂ is Arg, Ile, or Lys, X₂₃ is Ala, Cys, Leu, or Val, X₂₄ is Leu, Ala, or Val, X₂₅ is Thr or Ala, X₂₆ is Asp or Gly, X₂₇ is Glu or Lys, X₂₈ is Gln, Ala, His, Phe, or Pro, X₂₉ is Cys or Val, X₃₀ is Trp or Arg, X₃₁ is Ser or Arg, X₃₂ is Trp or Lys, X₃₃ is Lys or Val, X₃₄ is Ala, Cys, Ser, or Val, X₃₅ is Cys, Leu, or Val, X₃₆ is Val or Arg, X₃₇ is Leu, Gln, His, Ile, Lys, or Ser, X₃₈ is GGGGSGGGGS (SEQ ID NO: 162) or EPKSS (SEQ ID NO: 163), and the sialidase comprises at least one mutation relative to wild-type human Neu2 (SEQ ID NO: 1).

[0202] In certain embodiments, the sialidase-Fc fusion protein comprises the amino acid sequence of

(SEQ ID NO: 164)
X₁ASLPX₂LQX₃ESVFQSGAHAYRIPALLYLPGQQSLLAFAEQRASKKDE
HAELIVLRRGDYDAX₄THQVQWQAQEVVAQARLDGHRSMNPCPLYDX₅QT
GTLFLFFIAIPGQVTEQQQLQTRANVTRLCQVTSTDHGRTWSSPRDLTDA
AIGPAYREWSTFAVGPGHCLQLHDRARSLVVPAYAYRKLHPX₆QRPIPSA
FCFLSHDHGRTWARGHFVAQDTLECQVAEVETGEQRVVTLNARSHLRARV
QAQSTNDGLDFQESQLVKKLVEPPPX₇GCQGSVISFPSPRSGPGSPAQWL
LYTHPTHX₈X₉QRADLGAYLNPRPPAPEAWSEPVLLAKGSX₁₀AYSDLQS
MGTGPDGSPLFGCLYEANDYEEIX₁₁FX₁₂MFTLKQAFPAEYLPQX₁₃DK
THTCPPCPAPELLGGPSVFLFPPKPKDTLMISRTPEVTCVVVDVSHEDPE
VKFNWYVDGVEVHNAKTKPREEQYNSTYRVVSVLTVLHQDWLNGKEYKCK
VSNKALPAPIEKTISKAKGQPREPQVYTLPPSREEMTKNQVSLTCLVKGF
YPSDIAVEWESNGQPENNYKTTPPVLDSDGSFFLTSKLTVDKSRWQQGNV
FSCSVMHEALHNHYTQKSLSLSPGK,

wherein X₁ is Ala, Arg, Asn, Asp, Gln, Glu, Gly, His, Leu, Lys, Met, Phe, Thr, Val, or not present, X₂ is Phe, Trp, Tyr or Val, X₃ is Lys or Asp, X₄ is Pro, Asn, Asp, His, Glu, Gly, Ser or Thr, X₅ is Ala, Glu, or Lys, X₆ is Arg, Ile, or Lys, X₇ is Gln, Ala, His, Phe, or Pro, X₈ is Ser or Arg, X₉ is Trp or Lys, X₁₀ is Ala, Cys, Ser, or Val, X₁₁ is Val or Arg, X₁₂ is Leu, Gln, His, Ile, Lys, or Ser, and X₁₃ is GGGGSGGGGS (SEQ ID NO: 162) or EPKSS (SEQ ID NO: 163), and the sialidase comprises at least one mutation relative to wild-type human Neu2 (SEQ ID NO: 1). In certain embodiments, X₁ is Ala, Asp, Met, or not present, X₂ is Tyr or Val, X₃ is Lys or Asp, X₄ is Pro, Asn, Gly, Ser or Thr, X₅ is Ala or Glu, X₆ is Ile or Lys, X₇ is Gln or Ala, X₈ is Ser or Arg, X₉ is Trp or Lys, X₁₀ is Ala or Cys, X₁₁ is Val or Arg, and X₁₂ is Leu or Ile.

[0203] In certain embodiments, the sialidase-Fc fusion protein comprises the amino acid sequence of

(SEQ ID NO: 165)
X₁X₂SX₃X₄X₅LQX₆ESVFQSGAHAYRIPALLYLPGQQSLLAFAEQRAS
X₇X₈DEHAELIVX₉RRGDYDAX₁₀THQVQWX₁₁AQEVVAQAX₁₂LX₁₃GH
RSMNPCPLYDX₁₄QTGTLFLFFIAIPX₁₅X₁₆VTEX₁₇QQLQTRANVTRL
X₁₈X₁₉VTSTDHGRTWSSPRDLTDAAIGPX₂₀YREWSTFAVGPGHX₂₁LQ
LHDX₂₂X₂₃RSLVVPAYAYRKLHPX₂₄X₂₅X₂₆PIPSAFX₂₇FLSHDHGR
TWARGHFVX₂₈QDTX₂₉ECQVAEVX₃₀TGEQRVVTLNARSX₃₁X₃₂X₃₃
X₃₄RX₃₅QAQSX₃₆NX₃₇GLDFQX₃₈X₃₉QX₄₀VKKLX₄₁EPPPX₄₂G
X₄₃QGSVISFPSPRSGPGSPAQX₄₄LLYTHPTHX₄₅X₄₆QRADLGAYLNP
RPPAPEAWSEPX₄₇LLAKGSX₄₈AYSDLQSMGTGPDGSPLFGX₄₉LYEA
NDYEEIX₅₀FX₅₁MFTLKQAFPAEYLPQX₅₂DKTHTCPPCPAPELLGGPS
VFLFPPKPKDTLMISRTPEVTCVVVDVSHEDPEVKFNWYVDGVEVHNAKT
KPREEQYNSTYRVVSVLTVLHQDWLNGKEYKCKVSNKALPAPIEKTISKA
KGQPREPQVYTLPPSREEMTKNQVSLTCLVKGFYPSDIAVEWESNGQPEN
NYKTTPPVLDSDGSFFLTSKLTVDKSRWQQGNVFSCSVMHEALHNHYTQK
SLSLSPGK,

wherein X₁ is Ala, Arg, Asn, Asp, Gln, Glu, Gly, His, Leu, Lys, Met, Phe, Thr, Val, or not present, X₂ is Ala or Lys, X₃ is Asn or Leu, X₄ is Pro or His, X₅ is Phe, Trp, Tyr or Val, X₆ is Lys or Asp, X₇ is Lys, Arg, or Glu, X₈ is Lys, Ala, Arg, or Glu, X₉ is Leu or Met, X₁₀ is Pro, Asn, Asp, His, Glu, Gly, Ser or Thr, X₁₁ is Gln or His, X₁₂ is Arg or Lys, X₁₃ is Asp or Pro, X₁₄ is Ala, Glu or Lys, X₁₅ is Gly or Asp, X₁₆ is Gln or His, X₁₇ is Gln, Arg, or Lys, X₁₈ is Ala, Cys, Ile, Ser, Val, or Leu, X₁₉ is Gln, Leu, Glu, Phe, His, Ile, Leu, or Tyr, X₂₀ is Ala or Val, X₂₁ is Cys or Gly, X₂₂ is Arg or Pro, X₂₃ is Ala or Gly, X₂₄ is Arg, Ile, or Lys, X₂₅ is Gln or Pro, X₂₆ is Arg or Pro, X₂₇ is Ala, Cys, Leu, or Val, X₂₈ is Ala, Cys, Asn, Ser, or Thr, X₂₉ is Leu, Ala, or Val, X₃₀ is Glu or Pro, X₃₁ is His or Pro, X₃₂ is Leu, Asp, Asn, or Tyr, X₃₃ is Arg, Ala, Asp, Leu, Gln, or Tyr, X₃₄ is Ala, Cys, Phe, Gly, His, Ile, Lys, Leu, Met, Asn, Gln, Arg, Ser, Val, Trp, or Tyr, X₃₅ is Val, Ile, or Lys, X₃₆ is Thr or Ala, X₃₇ is Asp or Gly, X₃₈ is Glu, Lys, or Pro, X₃₉ is Ser or Cys, X₄₀ is Leu, Asp, Phe, Gln, or Thr, X₄₁ is Val or Phe, X₄₂ is Gln, Ala, His, Phe, Pro, Ser, or Thr, X₄₃ is Cys or Val, X₄₄ is Trp or Arg, X₄₅ is Ser, Arg, Ala, Asp, Glu, Phe, Gly, His, Ile, Lys, Leu, Met, Asn, Pro, Gln, Thr, Val, Trp, or Tyr, X₄₆ is Trp, Lys, Ala, Asp, Glu, Phe, Gly, His, Ile, Lys, Leu, Met, Asn, Pro, Gln, Arg, Ser, Thr, Val, or Tyr, X₄₇ is Lys or Val, X₄₈ is Ala, Cys, Ser, or Val, X₄₉ is Cys, Leu, or Val, X₅₀ is Val or Arg, X₅₁ is Leu, Gln, His, Ile, Lys, or Ser, X₅₂ is GGGGS (SEQ ID NO: 174), GGGGSGGGGS (SEQ ID NO: 162), or EPKSS (SEQ ID NO: 163), and the sialidase comprises at least one mutation relative to wild-type human Neu2 (SEQ ID NO: 1).

[0204] In certain embodiments, the sialidase-Fc fusion protein comprises the amino acid sequence of

(SEQ ID NO: 166)
X₁ASLPX₂LQX₃ESVFQSGAHAYRIPALLYLPGQQSLLAFAEQRASKKDE
HAELIVLRRGDYDAX₄THQVQWQAQEVVAQARLDGHRSMNPCPLYDX₅QT
GTLFLFFIAIPGQVTEQQQLQTRANVTRLCX₆VTSTDHGRTWSSPRDLTD
AAIGPAYREWSTFAVGPGHCLQLHDRARSLVVPAYAYRKLHPX₇QRPIPS
AFCFLSHDHGRTWARGHFVAQDTLECQVAEVETGEQRVVTLNARSHLRX₈
RVQAQSTNDGLDFQESQLVKKLVEPPPX₉GCQGSVISFPSPRSGPGSPAQ
WLLYTHPTHX₁₀X₁₁QRADLGAYLNPRPPAPEAWSEPVLLAKGSX₁₂AYS
DLQSMGTGPDGSPLFGCLYEANDYEEIX₁₃FX₁₄MFTLKQAFPAEYLPQ
X₁₅DKTHTCPPCPAPELLGGPSVFLFPPKPKDTLMISRTPEVTCVVVDVS
HEDPEVKFNWYVDGVEVHNAKTKPREEQYNSTYRVVSVLTVLHQDWLNGK
EYKCKVSNKALPAPIEKTISKAKGQPREPQVYTLPPSREEMTKNQVSLTC
LVKGFYPSDIAVEWESNGQPENNYKTTPPVLDSDGSFFLTSKLTVDKSRW
QQGNVFSCSVMHEALHNHYTQKSLSLSPGK,

wherein X₁ is Ala, Arg, Asn, Asp, Gln, Glu, Gly, His, Leu, Lys, Met, Phe, Thr, Val, or not present, X₂ is Phe, Trp, Tyr or Val, X₃ is Lys or Asp, X₄ is Pro, Asn, Asp, His, Glu, Gly, Ser or Thr, X₅ is Ala, Glu, or Lys, X₆ is Gln, Leu, Glu, Phe, His, Ile, Leu, or Tyr, X₇ is Arg, Ile, or Lys, X₈ is Ala, Cys, Phe, Gly, His, Ile, Lys, Leu, Met, Asn, Gln, Arg, Ser, Val, Trp, or Tyr, X₉ is Gln, Ala, His, Phe, Pro, Ser, or Thr, X₁₀ is Ser, Arg, Ala, Asp, Glu, Phe, Gly, His, Ile, Lys, Leu, Met, Asn, Pro, Gln, Thr, Val, Trp, or Tyr, X₁₁ is Trp, Lys, Ala, Asp, Glu, Phe, Gly, His, Ile, Lys, Leu, Met, Asn, Pro, Gln, Arg, Ser, Thr, Val, or Tyr, X₁₂ is Ala, Cys, Ser, or Val, X₁₃ is Val or Arg, X₁₄ is Leu, Gln, His, Ile, Lys, or Ser, X₁₅ is GGGGS (SEQ ID NO: 184), GGGGSGGGGS (SEQ ID NO: 162), or EPKSS (SEQ ID NO: 163), and the sialidase comprises at least one mutation relative to wild-type human Neu2 (SEQ ID NO: 1). In certain embodiments, X₁ is Ala, Asp, Met, or not present, X₂ is Tyr or Val, X₃ is Lys or Asp, X₄ is Pro, Asn, Gly, Ser or Thr, X₅ is Ala or Glu, X₆ is Gln or Tyr, X₇ is Ile or Lys, X₈ is Ala or Thr, X₉ is Gln, Ala, or Thr, X₁₀ is Ser, Arg, or Ala, X₁₁ is Trp, Lys, or Arg, X₁₂ is Ala or Cys, X₁₃ is Val or Arg, and X₁₄ is Leu or Ile.
b. Polyethylene Glycol (PEG)

[0205] In one embodiment, the serum half-life extender is polyethylene glycol (PEG) and derivatives thereof (for example, alkoxy polyethylene glycol, for example, methoxypolyethylene glycol, ethoxypolyethylene glycol and the like). In one embodiment, the sialidase as described herein is covalently attached to at least one PEG having an actual MW of at least about 20,000 D. In another embodiment, the sialidase is covalently attached to at least one PEG having an actual MW of at least about 30,000 D. In another embodiment, the sialidase is covalently attached to at least one PEG having an actual MW of at least about 40,000 D. In certain embodiments, the PEG is methoxyPEG(5000)-succinimidylpropionate (mPEG-SPA), methoxyPEG(5000)-succinimidylsuccinate (mPEG-SS). Such PEGS are commercially available from Nektar Therapeutics or SunBiowest or LaysanBio or NOF. In one embodiment, the PEG may be branched, or Y-shaped, as available from JenKem USA or NOF, or comb-shaped, or synthesized by coupling two or more PEGs to a small molecule such as glutamic acid.

[0206] The omega position of PEG may include a hydroxyl group or a methoxy group and the PEG may also contain an amino group in the omega position. Such an amino group can in turn be coupled to a variety of agents. In another embodiment of the present invention, the biological modifier can be a pegylated poly-L-lysine or a pegylated poly-D-lysine.

[0207] Attachment sites on a sialidase for a PEG or a derivative thereof include the N-terminal amino group and epsilon amino groups found on lysine residues, as well as other amino, imino, carboxyl, sulfhydryl, hydroxyl or other hydrophilic groups. PEG may be covalently bonded directly to the sialidase with or without the known use of a multifunctional (ordinarily bifunctional) crosslinking agent using chemistries and used in the art. For example, the PEG modifier can be conjugated to the sialidase by using a thiol reactive cross linker and then reacting with a thiol group on the PEG. In certain embodiments, sulfhydryl groups can be derivatized by coupling to maleimido-substituted PEG (e.g. alkoxy-PEG amine plus sulfosuccinimidyl 4-(N-maleimidomethyl)cyclohexane-1-carboxylate), or PEG-maleimide commercially available from Shearwater Polymers, Inc., Huntsville, Ala.).

[0208] c. Human Serum Albumin (HSA) and HSA Binders

[0209] Human serum albumin (HSA) (molecular mass ˜67 kDa) is the most abundant protein in plasma, present at about 50 mg/mL (600 μM), and has a half-life of around 20 days is humans. HSA serves to maintain plasma pH, contributes to colloidal blood pressure, functions as carrier of many metabolites and fatty acids, and serves as a major drug transport protein in plasma.

[0210] In certain embodiments, the serum half-life extender is human serum albumin (HSA) or an HSA-binding peptide (see, e.g., PCT Publication Nos. WO2013128027A1 and WO2014140358A1). The neonatal Fc receptor (FcRn) appears to be involved in prolonging the life-span of albumin in circulation (see, Chaudhury et al. (2003) J. EXP. MED., 3: 315-22). Albumin and IgG bind noncooperatively to distinct sites of FcRn and form a tri-molecular (see id.). Binding of human FcRn to HSA and to human IgG is pH dependent, stronger at acidic pH and weaker at neutral or physiological pH (see id.). This observation suggests that proteins and protein complexes containing albumin, similar to those containing IgG (particularly Fc), are protected from degradation through pH-sensitive interaction with FcRn (see id.). Using surface plasmon resonance (SPR) to measure the capacity of individual HSA domains to bind immobilized soluble human FcRn, it has been shown that FcRn and albumin interact via the D-III domain of albumin in a pH-dependent manner, on a site distinct from the IgG binding site (see, Chaudhury et al. (2006) BIOCHEM. 45:4983-90 and PCT Publication No. WO2008068280A1).

[0211] Exemplary HSA-binding proteins are known in the art. For example, U.S. Patent Application Publication No. US20130316952A1 discloses a polypeptide that binds serum albumin having the amino acid sequence of

(SEQ ID NO: 109)
LKEAKEKAIEELKKAGITSDYYFDLINKAKTVEGVNALKDEILKA.

Additional exemplary polypeptides that bind HSA are described in Dennis et al. (2002) J. BIOL. CHEM., 277: 35035-43; Jacobs et al. (2015) PROTEIN ENG. DES. SEL., 28: 385-93; and Zorzi et al. (2017) NAT. COMMUN., 8: 16092.

### III. Linkers

[0212] In certain embodiments, the sialidase can be linked or fused directly to the serum half-life extender. In other embodiments, the sialidase can be covalently bound to the serum half-life extender by a linker.

[0213] The linker may couple, with one or more natural amino acids, the sialidase, or functional fragment thereof, and the serum half-life extender, where the one or more natural amino acids (for example, a cysteine amino acid) may be introduced by site-directed mutagenesis. The linker may include one or more unnatural amino acids. It is contemplated that, in certain circumstances, a linker containing for example, one or more sulfhydryl reactive groups (e.g., a maleimide) may covalently link a cysteine in the sialidase or the serum half-life extender that is a naturally occurring cysteine residue or is the product of site-specific mutagenesis.

[0214] The linker may be a cleavable linker or a non-cleavable linker. Optionally or in addition, the linker may be a flexible linker or an inflexible linker.

[0215] The linker should be a length sufficiently long to allow the sialidase and the serum half-life extender to be linked without steric hindrance from one another and sufficiently short to retain the intended activity of the fusion protein. The linker preferably is sufficiently hydrophilic to avoid or minimize instability of the fusion protein. The linker preferably is sufficiently hydrophilic to avoid or minimize insolubility of the fusion protein. The linker should be sufficiently stable in vivo (e.g., it is not cleaved by serum, enzymes, etc.) to permit the fusion protein to be operative in vivo.

[0216] The linker may be from about 1 angstroms (Å) to about 150 Å in length, or from about 1 Å to about 120 Å in length, or from about 5 Å to about 110 Å in length, or from about 10 Å to about 100 Å in length. The linker may be greater than about 2, 3, 4, 5, 6, 7, 8, 9, 10, 11, 12, 13, 14, 15, 16, 17, 18, 19, 20, 25, 27, 30 or greater angstroms in length and/or less than about 110, 100, 90, 85, 80, 75, 70, 65, 60, 55, 50, 45, 43, 42, 41, 40, 39, 38, 37, 36, 35, 34, 33, 32, 31, or fewer A in length. Furthermore, the linker may be about 5, 10, 15, 20, 25, 30, 35, 40, 45, 50, 55, 60, 65, 70, 75, 80, 85, 90, 95, 100, 110, and 120 Å in length.

[0217] In certain embodiments, the linker comprises a polypeptide linker that connects or fuses the sialidase to the serum half-life extender (e.g., Fc domain) of the fusion protein. For example, it is contemplated that a gene encoding a sialidase linked directly or indirectly (for example, via an amino acid containing linker) to a serum half-life extender can be created and expressed using conventional recombinant DNA technologies. For example, the amino terminus of a sialidase can be linked to the carboxy terminus of a serum half-life extender. When a linker is employed, the linker may comprise hydrophilic amino acid residues, such as Gln, Ser, Gly, Glu, Pro, His and Arg. In certain embodiments, the linker is a peptide containing 1-25 amino acid residues, 1-20 amino acid residues, 2-15 amino acid residues, 3-10 amino acid residues, 3-7 amino acid residues, 4-25 amino acid residues, 4-20 amino acid residues, 4-15 amino acid residues, 4-10 amino acid residues, 5-25 amino acid residues, 5-20 amino acid residues, 5-15 amino acid residues, or 5-10 amino acid residues. Exemplary linkers include glycine and serine-rich linkers, e.g., (GlyGlyPro)ₙ, (SEQ ID NO: 110) or (GlyGlyGlyGlySer)ₙ, (SEQ ID NO: 111) where n is 1-5. In certain embodiments, the linker comprises, consists, or consists essentially of GGGGS (SEQ ID NO: 174). In certain embodiments, the linker comprises, consists, or consists essentially of GGGGSGGGGS (SEQ ID NO: 162). In certain embodiments, the linker comprises, consists, or consists essentially of EPKSS (SEQ ID NO: 163). Additional exemplary linker sequences are disclosed, e.g., in George et al. (2003) PROTEIN ENGINEERING 15:871-879, and U.S. Pat. Nos. 5,482,858 and 5,525,491.

IV. Methods of Making a Sialidase and/or a Sialidase Conjugated to a Serum Half-life Enhancer

[0218] Methods for producing a sialidase or a sialidase conjugated to a serum half-life enhancer e.g., those disclosed herein, are known in the art. For example, DNA molecules encoding a serum half-life enhancer (e.g., an Fc domain) can be synthesized chemically or by recombinant DNA methodologies. For example, the sequences of the serum half-life enhancer can be cloned by conventional hybridization techniques or polymerase chain reaction (PCR) techniques, using the appropriate synthetic nucleic acid primers. The resulting DNA molecules encoding the protein of interest can be ligated to other appropriate nucleotide sequences, including, for example, expression control sequences, to produce conventional gene expression constructs (i.e., expression vectors) encoding the desired serum half-life enhancer. Production of defined gene constructs is within routine skill in the art.

[0219] Nucleic acids encoding desired sialidases can be incorporated (ligated) into expression vectors, which can be introduced into host cells through conventional transfection or transformation techniques. Exemplary host cells are E. coli cells, Chinese hamster ovary (CHO) cells, human embryonic kidney 293 (HEK 293) cells, HeLa cells, baby hamster kidney (BHK) cells, monkey kidney cells (COS), human hepatocellular carcinoma cells (e.g., Hep G2), and myeloma cells that do not otherwise produce IgG protein. Transformed host cells can be grown under conditions that permit the host cells to express the sialidase.

[0220] Specific expression and purification conditions will vary depending upon the expression system employed. For example, if a gene is to be expressed in E. coli, it is first cloned into an expression vector by positioning the engineered gene downstream from a suitable bacterial promoter, e.g., Trp or Tac, and a prokaryotic signal sequence. The expressed protein may be secreted. The expressed protein may accumulate in refractile or inclusion bodies, which can be harvested after disruption of the cells by French press or sonication. The refractile bodies then are solubilized, and the protein may be refolded and/or cleaved by methods known in the art.

[0221] If the engineered gene is to be expressed in eukaryotic host cells, e.g., CHO cells, it is first inserted into an expression vector containing a suitable eukaryotic promoter, a secretion signal, a poly A sequence, and a stop codon. Optionally, the vector or gene construct may contain enhancers and introns. The gene construct can be introduced into eukaryotic host cells using conventional techniques.

[0222] A polypeptide comprising a sialidase or a fusion protein, e.g., a fusion protein comprising an immunoglobulin heavy chain variable region or light chain variable region, can be produced by growing (culturing) a host cell transfected with an expression vector encoding such a variable region, under conditions that permit expression of the polypeptide. Following expression, the polypeptide can be harvested and purified or isolated using techniques known in the art, e.g., affinity tags such as glutathione-S-transferase (GST) or histidine tags.

[0223] In embodiments in which a sialidase or sialidase conjugated to an Fc region, can be produced by growing (culturing) a host cell transfected with: (a) an expression vector that encodes a one Fc polypeptide, and a separate expression vector that encodes another Fc polypeptide; or (b) a single expression vector that encodes both Fc polypeptides, under conditions that permit expression of both polypeptides. The sialidase will be fused to one or more of the polypeptides. The intact sialidase-Fc domain fusion protein can be harvested and purified or isolated using techniques known in the art, e.g., Protein A, Protein G, affinity tags such as glutathione-S-transferase (GST) or histidine tags.

[0224] In certain embodiments, a sialidase or a sialidase conjugated to a serum half-life extender is expressed and/or purified in the presence of a stabilizing agent. The stabilizing agent prevents one or more of protein unfolding, protein misfolding, protein aggregation, protein inhibition, enzymatic loss and/or protein degradation of the sialidase or the sialidase conjugated to a serum half-life extender during expression, purification and/or storage. In certain embodiments, the stabilizing agent is a cation, such as a divalent cation. In certain embodiments, the cation is calcium or magnesium. The cation can be in the form of a salt, such as calcium chloride (CaCl₂) or magnesium chloride (MgCl₂).

[0225] In certain embodiments, the stabilizing agent is present in an amount from about 0.05 mM to about 5 mM during expression and/or purification. For example, the stabilizing agent may be present in an amount of from about 0.05 mM to about 4 mM, from about 0.05 mM to about 3 mM, from about 0.05 mM to about 2 mM, from about 0.05 mM to about 1 mM, from about 0.05 mM to about 0.5 mM, from about 0.5 mM to about 4 mM, from about 0.5 mM to about 3 mM, from about 0.5 mM to about 2 mM, from about 0.5 mM to about 1 mM, from about 1 mM to about 4 mM, from about 1 mM to about 3 mM, of from about 1 mM to about 2 mM.

[0226] In certain embodiments, in order to express a protein, e.g., a sialidase, as a secreted protein, a native N-terminal signal sequence of the protein is replaced, e.g., with MDMRVPAQLLGLLLLWLPGARC (SEQ ID NO: 28). In certain embodiments, to express a protein, e.g., a recombinant human sialidase, as a secreted protein, an N-terminal signal sequence, e.g., MDMRVPAQLLGLLLLWLPGARC (SEQ ID NO: 28), is added. Additional exemplary N-terminal signal sequences include signal sequences from interleukin-2, CD-5, IgG kappa light chain, trypsinogen, serum albumin, and prolactin. In certain embodiments, in order to express a protein, e.g., a recombinant human sialidase, as a secreted protein, a C terminal lysosomal signal motif, e.g., YGTL (SEQ ID NO: 29) is removed.

[0227] In certain embodiments, when a sialidase is chemically conjugated to a serum half-life extender, the chemical conjugation can be performed using methods known in the art. Attachment sites on a sialidase and/or a serum half-life extender include the N-terminal amino group and epsilon amino groups found on lysine residues, as well as other amino, imino, carboxyl, sulfhydryl, hydroxyl or other hydrophilic groups. A serum half-life extender may be covalently bonded directly to the sialidase with or without the known use of a multifunctional (ordinarily bifunctional) crosslinking agent using chemistries and used in the art. For example, in the case of PEG, sulfhydryl groups can be derivatized by coupling to maleimido-substituted PEG (e.g. alkoxy-PEG amine plus sulfosuccinimidyl 4-(N-maleimidomethyl)cyclohexane-1-carboxylate), or PEG-maleimide commercially available from Shearwater Polymers, Inc., Huntsville, Ala.).

### V. Pharmaceutical Compositions

[0228] For therapeutic use, a sialidase or sialidase conjugated to a half-life extender preferably is combined with a pharmaceutically acceptable carrier. The term “pharmaceutically acceptable” as used herein refers to those compounds, materials, compositions, and/or dosage forms which are, within the scope of sound medical judgment, suitable for use in contact with the tissues of human beings and animals without excessive toxicity, irritation, allergic response, or other problem or complication, commensurate with a reasonable benefit/risk ratio.

[0229] The term “pharmaceutically acceptable carrier” as used herein refers to buffers, carriers, and excipients suitable for use in contact with the tissues of human beings and animals without excessive toxicity, irritation, allergic response, or other problem or complication, commensurate with a reasonable benefit/risk ratio. Pharmaceutically acceptable carriers include any of the standard pharmaceutical carriers, such as a phosphate buffered saline solution, water, emulsions (e.g., such as an oil/water or water/oil emulsions), and various types of wetting agents. The compositions also can include stabilizers and preservatives. For examples of carriers, stabilizers and adjuvants, see, e.g., Martin, Remington's Pharmaceutical Sciences, 15th Ed., Mack Publ. Co., Easton, Pa. [1975]. Pharmaceutically acceptable carriers include buffers, solvents, dispersion media, coatings, isotonic and absorption delaying agents, and the like, that are compatible with pharmaceutical administration. The use of such media and agents for pharmaceutically active substances is known in the art.

[0230] In certain embodiments, a pharmaceutical composition may contain formulation materials for modifying, maintaining or preserving, for example, the pH, osmolarity, viscosity, clarity, color, isotonicity, odor, sterility, stability, rate of dissolution or release, adsorption or penetration of the composition. In such embodiments, suitable formulation materials include, but are not limited to, amino acids (such as glycine, glutamine, asparagine, arginine or lysine); antimicrobials; antioxidants (such as ascorbic acid, sodium sulfite or sodium hydrogen-sulfite); buffers (such as borate, bicarbonate, Tris-HCl, citrates, phosphates or other organic acids); bulking agents (such as mannitol or glycine); chelating agents (such as ethylenediamine tetraacetic acid (EDTA)); complexing agents (such as caffeine, polyvinylpyrrolidone, beta-cyclodextrin or hydroxypropyl-beta-cyclodextrin); fillers; monosaccharides; disaccharides; and other carbohydrates (such as glucose, mannose or dextrins); proteins (such as serum albumin, gelatin or immunoglobulins); coloring, flavoring and diluting agents; emulsifying agents; hydrophilic polymers (such as polyvinylpyrrolidone); low molecular weight polypeptides; salt-forming counterions (such as sodium); preservatives (such as benzalkonium chloride, benzoic acid, salicylic acid, thimerosal, phenethyl alcohol, methylparaben, propylparaben, chlorhexidine, sorbic acid or hydrogen peroxide); solvents (such as glycerin, propylene glycol or polyethylene glycol); sugar alcohols (such as mannitol or sorbitol); suspending agents; surfactants or wetting agents (such as pluronics, PEG, sorbitan esters, polysorbates such as polysorbate 20, polysorbate, triton, tromethamine, lecithin, cholesterol, tyloxapal); stability enhancing/stabilizing agents (such as sucrose, sorbitol, or a cation); tonicity enhancing agents (such as alkali metal halides, preferably sodium or potassium chloride, mannitol sorbitol); delivery vehicles; diluents; excipients and/or pharmaceutical adjuvants (see, Remington's Pharmaceutical Sciences, 18th ed. (Mack Publishing Company, 1990).

[0231] In certain embodiments, a pharmaceutical composition may contain a stabilizing agent. In certain embodiments, the stabilizing agent is a cation, such as a divalent cation. In certain embodiments, the cation is calcium or magnesium. The cation can be in the form of a salt, such as calcium chloride (CaCl₂) or magnesium chloride (MgCl₂).

[0232] In certain embodiments, the stabilizing agent is present in an amount from about 0.05 mM to about 5 mM. For example, the stabilizing agent may be present in an amount of from about 0.05 mM to about 4 mM, from about 0.05 mM to about 3 mM, from about 0.05 mM to about 2 mM, from about 0.05 mM to about 1 mM, from about 0.05 mM to about 0.5 mM, from about 0.5 mM to about 4 mM, from about 0.5 mM to about 3 mM, from about 0.5 mM to about 2 mM, from about 0.5 mM to about 1 mM, from about 1 mM to about 4 mM, from about 1 mM to about 3 mM, of from about 1 mM to about 2 mM.

[0233] In certain embodiments, a pharmaceutical composition may contain nanoparticles, e.g., polymeric nanoparticles, liposomes, or micelles (See Anselmo et al. (2016) BIOENG. TRANSL. MED. 1: 10-29).

[0234] In certain embodiments, a pharmaceutical composition may contain a sustained- or controlled-delivery formulation. Techniques for formulating sustained- or controlled-delivery means, such as liposome carriers, bio-erodible microparticles or porous beads and depot injections, are also known to those skilled in the art. Sustained-release preparations may include, e.g., porous polymeric microparticles or semipermeable polymer matrices in the form of shaped articles, e.g., films, or microcapsules. Sustained release matrices may include polyesters, hydrogels, polylactides, copolymers of L-glutamic acid and gamma ethyl-L-glutamate, poly (2-hydroxyethyl-methacrylate), ethylene vinyl acetate, or poly-D(−)-3-hydroxybutyric acid. Sustained release compositions may also include liposomes that can be prepared by any of several methods known in the art.

[0235] Pharmaceutical compositions containing a sialidase or sialidase conjugated to a half-life extender can be presented in a dosage unit form and can be prepared by any suitable method. A pharmaceutical composition should be formulated to be compatible with its intended route of administration. Examples of routes of administration are intravenous (IV), intradermal, inhalation, transdermal, topical, transmucosal, intrathecal and rectal administration. In certain embodiments, a sialidase or sialidase conjugated to a half-life extender is administered by IV infusion. In certain embodiments, a sialidase or sialidase conjugated to a half-life extender is administered by intratumoral injection. Useful formulations can be prepared by methods known in the pharmaceutical art. For example, see Remington's Pharmaceutical Sciences, 18th ed. (Mack Publishing Company, 1990). Formulation components suitable for parenteral administration include a sterile diluent such as water for injection, saline solution, fixed oils, polyethylene glycols, glycerin, propylene glycol or other synthetic solvents; antibacterial agents such as benzyl alcohol or methyl parabens; antioxidants such as ascorbic acid or sodium bisulfite; chelating agents such as EDTA; buffers such as acetates, citrates or phosphates; and agents for the adjustment of tonicity such as sodium chloride or dextrose.

[0236] For intravenous administration, suitable carriers include physiological saline, bacteriostatic water, Cremophor ELTM (BASF, Parsippany, N.J.) or phosphate buffered saline (PBS). The carrier should be stable under the conditions of manufacture and storage, and should be preserved against microorganisms. The carrier can be a solvent or dispersion medium containing, for example, water, ethanol, polyol (for example, glycerol, propylene glycol, and liquid polyethylene glycol), and suitable mixtures thereof.

[0237] Pharmaceutical formulations preferably are sterile. Sterilization can be accomplished by any suitable method, e.g., filtration through sterile filtration membranes. Where the composition is lyophilized, filter sterilization can be conducted prior to or following lyophilization and reconstitution.

[0238] In certain embodiments, the pharmaceutical composition is disposed in a sterile container (e.g., bottle or vial). The pharmaceutical composition can be, for example, lyophilized or present as a solution in the sterile container. The sterile container can be sealed with a septum and can have a label disposed thereon identifying the pharmaceutical composition contained in the container.

[0239] The compositions described herein may be administered locally or systemically. Administration will generally be parenteral administration. In a preferred embodiment, the pharmaceutical composition is administered subcutaneously and in an even more preferred embodiment intravenously. Preparations for parenteral administration include sterile aqueous or non-aqueous solutions, suspensions, and emulsions.

[0240] Generally, a therapeutically effective amount of active component, for example, a sialidase or sialidase conjugated to a half-life extender, is in the range of 0.1 mg/kg to 100 mg/kg, e.g., 1 mg/kg to 100 mg/kg, 1 mg/kg to 10 mg/kg. The amount administered will depend on variables such as the type and extent of disease or indication to be treated, the overall health of the patient, the in vivo potency of the active component, the pharmaceutical formulation, and the route of administration. The initial dosage can be increased beyond the upper level in order to rapidly achieve the desired blood-level or tissue-level. Alternatively, the initial dosage can be smaller than the optimum, and the daily dosage may be progressively increased during the course of treatment. Human dosage can be optimized, e.g., in a conventional Phase I dose escalation study designed to run from 0.5 mg/kg to 20 mg/kg. Dosing frequency can vary, depending on factors such as route of administration, dosage amount, serum half-life of the sialidase or sialidase conjugated to a half-life extender, and the disease being treated. Exemplary dosing frequencies are once per day, once per week and once every two weeks. A preferred route of administration is parenteral, e.g., intravenous infusion. In certain embodiments, a sialidase or sialidase conjugated to a half-life extender is lyophilized, and then reconstituted in buffered saline, at the time of administration.

### VI. Therapeutic Uses

[0241] The compositions and methods disclosed herein can be used to treat various forms of cancer in a subject or inhibit cancer growth in a subject. The invention provides a method of treating a cancer in a subject. The method comprises administering to the subject an effective amount of a sialidase or sialidase conjugated to a half-life extender either alone or in a combination with another therapeutic agent to treat the cancer in the subject. The term “effective amount” as used herein refers to the amount of an active agent (e.g., sialidase or sialidase conjugated to a half-life extender according to the present invention) sufficient to effect beneficial or desired results. An effective amount can be administered in one or more administrations, applications or dosages and is not intended to be limited to a particular formulation or administration route.

[0242] As used herein, “treat”, “treating” and “treatment” mean the treatment of a disease in a subject, e.g., in a human. This includes: (a) inhibiting the disease, i.e., arresting its development; and (b) relieving the disease, i.e., causing regression of the disease state. As used herein, the terms “subject” and “patient” refer to an organism to be treated by the methods and compositions described herein. Such organisms preferably include, but are not limited to, mammals (e.g., murines, simians, equines, bovines, porcines, canines, felines, and the like), and more preferably includes humans.

[0243] Examples of cancers include solid tumors, soft tissue tumors, hematopoietic tumors and metastatic lesions. Examples of hematopoietic tumors include, leukemia, acute leukemia, acute lymphoblastic leukemia (ALL), B-cell, T-cell or FAB ALL, acute myeloid leukemia (AML), chronic myelocytic leukemia (CML), chronic lymphocytic leukemia (CLL), e.g., transformed CLL, diffuse large B-cell lymphomas (DLBCL), follicular lymphoma, hairy cell leukemia, myelodyplastic syndrome (MDS), a lymphoma, Hodgkin's disease, a malignant lymphoma, non-Hodgkin's lymphoma, Burkitt's lymphoma, multiple myeloma, or Richter's Syndrome (Richter's Transformation). Examples of solid tumors include malignancies, e.g., sarcomas, adenocarcinomas, and carcinomas, of the various organ systems, such as those affecting head and neck (including pharynx), thyroid, lung (small cell or non-small cell lung carcinoma (NSCLC)), breast, lymphoid, gastrointestinal (e.g., oral, esophageal, stomach, liver, pancreas, small intestine, colon and rectum, anal canal), genitals and genitourinary tract (e.g., renal, urothelial, bladder, ovarian, uterine, cervical, endometrial, prostate, testicular), CNS (e.g., neural or glial cells, e.g., neuroblastoma or glioma), or skin (e.g., melanoma).

[0244] In certain embodiments the cancer is an epithelial cancer, e.g., an epithelial cancer that upregulates the expression of sialylated glycans. Exemplary epithelial cancers include, but are not limited to, endometrial cancer, colon cancer, ovarian cancer, cervical cancer, vulvar cancer, uterine cancer or fallopian tube cancer, breast cancer, prostate cancer, lung cancer, pancreatic cancer, urinary cancer, bladder cancer, head and neck cancer, oral cancer and liver cancer. Epithelial cancers also include carcinomas, for example, acinar carcinoma, acinous carcinoma, adenocystic carcinoma, adenoid cystic carcinoma, carcinoma adenomatosum, carcinoma of adrenal cortex, alveolar carcinoma, alveolar cell carcinoma, basal cell carcinoma, carcinoma basocellulare, basaloid carcinoma, baso squamous cell carcinoma, bronchioalveolar carcinoma, bronchiolar carcinoma, bronchogenic carcinoma, cerebriform carcinoma, cholangiocellular carcinoma, chorionic carcinoma, colloid carcinoma, comedo carcinoma, corpus carcinoma, cribriform carcinoma, carcinoma en cuirasse, carcinoma cutaneum, cylindrical carcinoma, cylindrical cell carcinoma, duct carcinoma, carcinoma durum, embryonal carcinoma, encephaloid carcinoma, epiermoid carcinoma, carcinoma epitheliale adenoides, exophytic carcinoma, carcinoma ex ulcere, carcinoma fibrosum, gelatiniforni carcinoma, gelatinous carcinoma, giant cell carcinoma, carcinoma gigantocellulare, glandular carcinoma, granulosa cell carcinoma, hair-matrix carcinoma, hematoid carcinoma, hepatocellular carcinoma, Hurthle cell carcinoma, hyaline carcinoma, hypemephroid carcinoma, infantile embryonal carcinoma, carcinoma in situ, intraepidermal carcinoma, intraepithelial carcinoma, Krompecher's carcinoma, Kulchitzky-cell carcinoma, large-cell carcinoma, lenticular carcinoma, carcinoma lenticulare, lipomatous carcinoma, lymphoepithelial carcinoma, carcinoma medullare, medullary carcinoma, melanotic carcinoma, carcinoma molle, mucinous carcinoma, carcinoma muciparum, carcinoma mucocellulare, mucoepidermoid carcinoma, carcinoma mucosum, mucous carcinoma, carcinoma myxomatodes, nasopharyngeal carcinoma, oat cell carcinoma, carcinoma ossifi cans, osteoid carcinoma, papillary carcinoma, periportal carcinoma, preinvasive carcinoma, prickle cell carcinoma, pultaceous carcinoma, renal cell carcinoma of kidney, reserve cell carcinoma, carcinoma sarcomatodes, schneiderian carcinoma, scirrhous carcinoma, carcinoma scroti, signet-ring cell carcinoma, carcinoma simplex, small-cell carcinoma, solanoid carcinoma, spheroidal cell carcinoma, spindle cell carcinoma, carcinoma spongiosum, squamous carcinoma, squamous cell carcinoma, string carcinoma, carcinoma telangiectaticum, carcinoma telangiectodes, transitional cell carcinoma, carcinoma tuberosum, tuberous carcinoma, verrucous carcinoma, and carcinoma villosum.

[0245] In certain embodiments, the cancer is breast cancer. In certain embodiments, the cancer is an adenocarcinoma. In certain embodiments, the cancer is a metastatic cancer. In certain embodiments, the cancer is a refractory cancer.

[0246] In certain embodiments, the cancer is resistant to or non-responsive to treatment with an antibody, e.g., an antibody with ADCC activity, e.g., trastuzumab.

[0247] The methods and compositions described herein can be used alone or in combination with other therapeutic agents and/or modalities. The term administered “in combination,” as used herein, is understood to mean that two (or more) different treatments are delivered to the subject during the course of the subject's affliction with the disorder, such that the effects of the treatments on the patient overlap at a point in time. In certain embodiments, the delivery of one treatment is still occurring when the delivery of the second begins, so that there is overlap in terms of administration. This is sometimes referred to herein as “simultaneous” or “concurrent delivery.” In other embodiments, the delivery of one treatment ends before the delivery of the other treatment begins. In certain embodiments of either case, the treatment is more effective because of combined administration. For example, the second treatment is more effective, e.g., an equivalent effect is seen with less of the second treatment, or the second treatment reduces symptoms to a greater extent, than would be seen if the second treatment were administered in the absence of the first treatment, or the analogous situation is seen with the first treatment. In certain embodiments, delivery is such that the reduction in a symptom, or other parameter related to the disorder is greater than what would be observed with one treatment delivered in the absence of the other. The effect of the two treatments can be partially additive, wholly additive, or greater than additive. The delivery can be such that an effect of the first treatment delivered is still detectable when the second is delivered.

[0248] In certain embodiments, a method or composition described herein, is administered in combination with one or more additional therapies, e.g., surgery, radiation therapy, or administration of another therapeutic preparation. In certain embodiments, the additional therapy may include chemotherapy, e.g., a cytotoxic agent. In certain embodiments the additional therapy may include a targeted therapy, e.g. a tyrosine kinase inhibitor, a proteasome inhibitor, or a protease inhibitor. In certain embodiments, the additional therapy may include an anti-inflammatory, anti-angiogenic, anti-fibrotic, or anti-proliferative compound, e.g., a steroid, a biologic immunomodulator, a monoclonal antibody, an antibody fragment, an aptamer, an siRNA, an antisense molecule, a fusion protein, a cytokine, a cytokine receptor, a bronchodilator, a statin, an anti-inflammatory agent (e.g. methotrexate), or an NSAID. In certain embodiments, the additional therapy may include a combination of therapeutics of different classes.

[0249] In certain embodiments, a method or composition described herein is administered in combination with a checkpoint inhibitor. The checkpoint inhibitor may, for example, be selected from a PD-1 antagonist, PD-L1 antagonist, CTLA-4 antagonist, adenosine A2A receptor antagonist, B7-H3 antagonist, B7-H4 antagonist, BTLA antagonist, KIR antagonist, LAG3 antagonist, TIM-3 antagonist, VISTA antagonist or TIGIT antagonist.

[0250] In certain embodiments, the checkpoint inhibitor is a PD-1 or PD-L1 inhibitor. PD-1 is a receptor present on the surface of T-cells that serves as an immune system checkpoint that inhibits or otherwise modulates T-cell activity at the appropriate time to prevent an overactive immune response. Cancer cells, however, can take advantage of this checkpoint by expressing ligands, for example, PD-L1, that interact with PD-1 on the surface of T-cells to shut down or modulate T-cell activity. Exemplary PD-1/PD-L1 based immune checkpoint inhibitors include antibody based therapeutics. Exemplary treatment methods that employ PD-1/PD-L1 based immune checkpoint inhibition are described in U.S. Pat. Nos. 8,728,474 and 9,073,994, and EP Patent No. 1537878B1, and, for example, include the use of anti-PD-1 antibodies. Exemplary anti-PD-1 antibodies are described, for example, in U.S. Pat. Nos. 8,952,136, 8,779,105, 8,008,449, 8,741,295, 9,205,148, 9,181,342, 9,102,728, 9,102,727, 8,952,136, 8,927,697, 8,900,587, 8,735,553, and 7,488,802. Exemplary anti-PD-1 antibodies include, for example, nivolumab (Opdivo®, Bristol-Myers Squibb Co.), pembrolizumab (Keytruda®, Merck Sharp & Dohme Corp.), PDR001 (Novartis Pharmaceuticals), and pidilizumab (CT-011, Cure Tech). Exemplary anti-PD-L1 antibodies are described, for example, in U.S. Pat. Nos. 9,273,135, 7,943,743, 9,175,082, 8,741,295, 8,552,154, and 8,217,149. Exemplary anti-PD-L1 antibodies include, for example, atezolizumab (Tecentriq®, Genentech), durvalumab (AstraZeneca), MEDI4736, avelumab, and BMS 936559 (Bristol Myers Squibb Co.).

[0251] In certain embodiments, a method or composition described herein is administered in combination with a CTLA-4 inhibitor. In the CTLA-4 pathway, the interaction of CTLA-4 on a T-cell with its ligands (e.g., CD80, also known as B7-1, and CD86) on the surface of an antigen presenting cells (rather than cancer cells) leads to T-cell inhibition. Exemplary CTLA-4 based immune checkpoint inhibition methods are described in U.S. Pat. Nos. 5,811,097, 5,855,887, 6,051,227. Exemplary anti-CTLA-4 antibodies are described in U.S. Pat. Nos. 6,984,720, 6,682,736, 7,311,910; 7,307,064, 7,109,003, 7,132,281, 6,207,156, 7,807,797, 7,824,679, 8,143,379, 8,263,073, 8,318,916, 8,017,114, 8,784,815, and 8,883,984, International (PCT) Publication Nos. WO98/42752, WO00/37504, and WO01/14424, and European Patent No. EP 1212422 B1. Exemplary CTLA-4 antibodies include ipilimumab or tremelimumab.

[0252] In certain embodiments, a method or composition described herein is administered in combination with (i) a PD-1 or PD-L1 inhibitor, e.g., a PD-1 or PD-L1 inhibitor disclosed herein, and (ii) CTLA-4 inhibitor, e.g., a CTLA-4 inhibitor disclosed herein.

[0253] In certain embodiments, a method or composition described herein is administered in combination with a CD20 inhibitor. In certain embodiments, the CD20 inhibitor is an anti-CD20 antibody. In certain embodiments, the anti-CD20 antibody is selected from the group consisting of ofatumumab, rituximab, ocrelizumab, iodine I 131 tositumomab, obinutuzumab, ibritumomab, and hyaluronidase ritixumab.

[0254] In certain embodiments, a method or composition described herein is administered in combination with an IDO inhibitor. Exemplary IDO inhibitors include 1-methyl-D-tryptophan (known as indoximod), epacadostat (INCB24360), navoximod (GDC-0919), and BMS-986205.

[0255] Exemplary cytotoxic agents that can be administered in combination with a method or composition described herein include, for example, antimicrotubule agents, topoisomerase inhibitors, antimetabolites, protein synthesis and degradation inhibitors, mitotic inhibitors, alkylating agents, platinating agents, inhibitors of nucleic acid synthesis, histone deacetylase inhibitors (HDAC inhibitors, e.g., vorinostat (SAHA, MK0683), entinostat (MS-275), panobinostat (LBH589), trichostatin A (TSA), mocetinostat (MGCD0103), belinostat (PXD101), romidepsin (FK228, depsipeptide)), DNA methyltransferase inhibitors, nitrogen mustards, nitrosoureas, ethylenimines, alkyl sulfonates, triazenes, folate analogs, nucleoside analogs, ribonucleotide reductase inhibitors, vinca alkaloids, taxanes, epothilones, intercalating agents, agents capable of interfering with a signal transduction pathway, agents that promote apoptosis and radiation, or antibody molecule conjugates that bind surface proteins to deliver a toxic agent. In one embodiment, the cytotoxic agent that can be administered with a method or composition described herein is a platinum-based agent (such as cisplatin), cyclophosphamide, dacarbazine, methotrexate, fluorouracil, gemcitabine, capecitabine, hydroxyurea, topotecan, irinotecan, azacytidine, vorinostat, ixabepilone, bortezomib, taxanes (e.g., paclitaxel or docetaxel), cytochalasin B, gramicidin D, ethidium bromide, emetine, mitomycin, etoposide, tenoposide, vincristine, vinblastine, vinorelbine, colchicin, anthracyclines (e.g., doxorubicin or epirubicin) daunorubicin, dihydroxy anthracin dione, mitoxantrone, mithramycin, actinomycin D, adriamycin, 1-dehydrotestosterone, glucocorticoids, procaine, tetracaine, lidocaine, propranolol, puromycin, ricin, or maytansinoids.

[0256] The invention also provides a method of increasing the expression of granzyme B, IL-1b, IL-2, IL-6, IL-10, IL-17A, HLA-DR, CD86, CD83, IFNγ, or TNFα in a cell, tissue, or subject. The method comprises contacting the cell, tissue, or subject with an effective amount of a sialidase or sialidase conjugated to a half-life extender so as to increase the expression of granzyme B, IL-1b, IL-2, IL-6, IL-10, IL-17A, HLA-DR, CD86, CD83, IFNγ, or TNFα in a cell, tissue, or subject relative the corresponding expression level prior to contact with the sialidase or sialidase conjugated to the half-life extender. In certain embodiments, the cell is selected from a dendritic cell and a peripheral blood mononuclear cell (PBMC, e.g., a monocyte).

[0257] In certain embodiments, expression of granzyme B, IL-1b, IL-2, IL-6, IL-10, IL-17A, HLA-DR, CD86, CD83, IFNγ, or TNFα in the cell, tissue, or subject is increased by at least about 10%, at least about 20%, at least about 50%, at least about 75%, at least about 100%, at least about 150%, at least about 200%, at least about 250%, at least about 300%, at least about 400%, at least about 500%, at least about 600%, at least about 700%, at least about 800%, at least about 900%, or at least about 1,000%, relative to a similar or otherwise identical cell or tissue that has not been contacted with the sialidase or sialidase conjugated to a half-life extender. Gene expression may be measured by any suitable method known in the art, for example, by ELISA, by Luminex multiplex assays, or by flow cytometry as described in the examples herein.

[0258] The invention also provides a method of removing sialic acid from a cell or tissue. The method comprises contacting the cell or tissue with an effective amount of a sialidase or sialidase conjugated to a half-life extender. The invention also provides a method of removing sialic acid from a cell in a subject, the method comprising administering to the subject an effective amount of a pharmaceutical composition comprising a sialidase or sialidase conjugated to a half-life extender thereby to remove sialic acid from the cell.

[0259] In certain embodiments, the cell is tumor cell, dendritic cell (DC) or monocyte. In certain embodiments, the cell is a monocyte, and the method results in increased expression of an MHC-II molecule (e.g., HLA-DR) on the monocyte. In certain embodiments, expression of an MHC-II molecule in the cell or tissue is increased by at least about 10%, at least about 20%, at least about 50%, at least about 75%, at least about 100%, at least about 150%, at least about 200%, at least about 250%, at least about 300%, at least about 400%, at least about 500%, at least about 600%, at least about 700%, at least about 800%, at least about 900%, or at least about 1,000%, relative to a similar or otherwise identical cell or tissue that has not been contacted with the sialidase or sialidase conjugated to a half-life extender. Gene expression may be measured by any suitable method known in the art, for example, by ELISA, by Luminex multiplex assays, or by flow cytometry as described in the examples herein.

[0260] The invention also provides a method of increasing phagocytosis of a tumor cell. The method comprises contacting the tumor cell with a sialidase or sialidase conjugated to a half-life extender in an amount effective to remove sialic acid from the tumor cell, thereby increasing phagocytosis of the tumor cell. In certain embodiments, the disclosure relates to a method of increasing phagocytosis of a tumor cell in a subject, the method comprising administering to the subject an effective amount of a pharmaceutical composition comprising a sialidase or sialidase conjugated to a half-life extender in an amount effective to remove sialic acid from the tumor cell, thereby increasing phagocytosis of the tumor cell.

[0261] In certain embodiments, phagocytosis is increased by at least about 10%, at least about 20%, at least about 50%, at least about 75%, at least about 100%, at least about 150%, at least about 200%, at least about 250%, at least about 300%, at least about 400%, at least about 500%, at least about 600%, at least about 700%, at least about 800%, at least about 900%, or at least about 1,000%, relative to a similar or otherwise identical tumor cell or population of tumor cells that has not or have not been contacted with the sialidase or sialidase conjugated to a half-life extender. Phagocytosis may be measured as described in Example 9 herein.

[0262] The invention also provides a method of activating a dendritic cell (DC) or a population of DCs. The method comprises contacting the DC or population of DCs with a tumor cell that has been treated with a sialidase or sialidase conjugated to a half-life extender. In certain embodiments, the disclosure relates to a method of activating a dendritic cell (DC) or a population of DCs in a subject, the method comprising administering to the subject an amount of a pharmaceutical composition comprising a sialidase or sialidase conjugated to a half-life extender effective to remove sialic acid from a tumor cell in the subject, thereby to activate the DC or the population of DCs in the subject.

[0263] In certain embodiments, activation of the DC or a population of DCs is increased by at least about 10%, at least about 20%, at least about 50%, at least about 75%, at least about 100%, at least about 150%, at least about 200%, at least about 250%, at least about 300%, at least about 400%, at least about 500%, at least about 600%, at least about 700%, at least about 800%, at least about 900%, or at least about 1,000%, relative to a similar or otherwise identical DC or population of DCs that has not or have not been contacted with a tumor cell that has been treated with the sialidase or sialidase conjugated to a half-life extender. Activation may be measured as described in Example 8 herein.

[0264] The invention also provides a method of reducing Siglec-15 binding activity, thereby increasing anti-tumor activity in a tumor microenvironment, the method comprising contacting a T cell with a sialidase or sialidase conjugated to a half-life extender. In certain embodiments, the disclosure relates to a method of reducing Siglec-15 binding activity, thereby increasing anti-tumor activity in a tumor microenvironment of a patient, the method comprising administering to the subject an effective amount of a pharmaceutical composition comprising a sialidase or sialidase conjugated to a half-life extender, thereby increasing anti-tumor activity (e.g., T cell activity) in the subject.

[0265] In certain embodiments, Siglec-15 binding activity is reduced by at least about 10%, at least about 20%, at least about 50%, at least about 75%, or about 100%, relative to Siglec-15 that has not been contacted with the sialidase or sialidase conjugated to a half-life extender. Binding may be measured as described in Example 16 herein.

[0266] The invention also provides a method of promoting infiltration of immune cells into a tumor in a subject in need thereof. The method comprises administering to the subject an effective amount of a sialidase or sialidase conjugated to a half-life extender, e.g., a sialidase or sialidase conjugated to a half-life extender disclosed herein. In certain embodiments, the immune cells are T-cells, e.g., CD4+ and/or CD8+ T-cells, e.g., CD69⁺CD8⁺ and/or GzmB⁺CD8⁺ T-cells. In certain embodiments, the immune cells are natural killer (NK) cells.

[0267] In certain embodiments, the infiltration of immune cells into the tumor in the subject is increased by at least about 10%, at least about 20%, at least about 50%, at least about 75%, at least about 100%, at least about 150%, at least about 200%, at least about 250%, at least about 300%, at least about 400%, at least about 500%, at least about 600%, at least about 700%, at least about 800%, at least about 900%, or at least about 1,000%, relative to a similar or otherwise identical tumor and/or subject that has not been administered the sialidase or sialidase conjugated to a half-life extender. Infiltration of immune cells into a tumor may be measured by any suitable method known in the art, for example, antibody staining.

[0268] The invention also provides a method of increasing the number of circulating natural killer (NK) cells in a subject in need thereof. The method comprises administering to the subject an effective amount of a sialidase or sialidase conjugated to a half-life extender, e.g., a sialidase or sialidase conjugated to a half-life extender disclosed herein, so as to increase the number of circulating NK cells relative to prior to administration of the sialidase or sialidase conjugated to a half-life extender or pharmaceutical composition.

[0269] In certain embodiments, the number of circulating NK cells in the subject is increased by at least about 10%, at least about 20%, at least about 50%, at least about 75%, at least about 100%, at least about 150%, at least about 200%, at least about 250%, at least about 300%, at least about 400%, at least about 500%, at least about 600%, at least about 700%, at least about 800%, at least about 900%, or at least about 1,000%, relative to a similar or otherwise identical subject that has not been administered the sialidase or sialidase conjugated to a half-life extender. Circulating NK cells in a subject may be measured by any suitable method known in the art, for example, antibody staining.

[0270] The invention also provides a method of increasing the number of T-cells in the draining lymph node in a subject in need thereof. The method comprises administering to the subject an effective amount of a sialidase or sialidase conjugated to a half-life extender, e.g., a sialidase or sialidase conjugated to a half-life extender disclosed herein, so as to increase the number of T-cells in the draining lymph node relative to prior to administration of the sialidase or sialidase conjugated to a half-life extender or pharmaceutical composition. In certain embodiments, the immune cells are T-cells, e.g., CD4+ and/or CD8+ T-cells.

[0271] In certain embodiments, the number of T-cells in the draining lymph node in the subject is increased by at least about 10%, at least about 20%, at least about 50%, at least about 75%, at least about 100%, at least about 150%, at least about 200%, at least about 250%, at least about 300%, at least about 400%, at least about 500%, at least about 600%, at least about 700%, at least about 800%, at least about 900%, or at least about 1,000%, relative to a similar or otherwise identical subject that has not been administered the sialidase or sialidase conjugated to a half-life extender. T-cells in the draining lymph node in a subject may be measured by any suitable method known in the art, for example, antibody.

[0272] The invention also provides a method of increasing expression of Cd3, Cd4, Cd8, Cd274, Ctla4, Icos, Pdcd1, Lag3, Il6, Il1b, Il2, Ifng, Ifna1, Mx1, Gzmb, Cxcl9, Cxcl12, and/or Ccl5 in a cell, tissue, or subject. The method comprises contacting the cell, tissue, or subject with an effective amount of a sialidase or sialidase conjugated to a half-life extender, e.g., a sialidase or sialidase conjugated to a half-life extender disclosed herein, so as to increase the expression of Cd3, Cd4, Cd8, Cd274, Ctla4, Icos, Pdcd1, Lag3, Il6, Il1b, Il2, Ifng, Ifna1, Mx1, Gzmb, Cxcl9, Cxcl12, and/or Ccl5 relative to the cell, tissue or subject prior to contact with the sialidase or sialidase conjugated to a half-life extender or pharmaceutical composition.

[0273] In certain embodiments, expression of Cd3, Cd4, Cd8, Cd274, Ctla4, Icos, Pdcd1, Lag3, Il6, Il1b, Il2, Ifng, Ifna1, Mx1, Gzmb, Cxcl9, Cxcl12, and/or Ccl5 in the cell, tissue, or subject is increased by at least about 10%, at least about 20%, at least about 50%, at least about 75%, at least about 100%, at least about 150%, at least about 200%, at least about 250%, at least about 300%, at least about 400%, at least about 500%, at least about 600%, at least about 700%, at least about 800%, at least about 900%, or at least about 1,000%, relative to a similar or otherwise identical cell, tissue, or subject that has not been contacted with the sialidase or sialidase conjugated to a half-life extender. Gene expression may be measured by any suitable method known in the art, for example, by ELISA, Luminex multiplex assays, or Nanostring technology.

[0274] Throughout the description, where compositions are described as having, including, or comprising specific components, or where processes and methods are described as having, including, or comprising specific steps, it is contemplated that, additionally, there are compositions of the present invention that consist essentially of, or consist of, the recited components, and that there are processes and methods according to the present invention that consist essentially of, or consist of, the recited processing steps.

[0275] In the application, where an element or component is said to be included in and/or selected from a list of recited elements or components, it should be understood that the element or component can be any one of the recited elements or components, or the element or component can be selected from a group consisting of two or more of the recited elements or components.

[0276] Further, it should be understood that elements and/or features of a composition or a method described herein can be combined in a variety of ways without departing from the spirit and scope of the present invention, whether explicit or implicit herein. For example, where reference is made to a particular compound, that compound can be used in various embodiments of compositions of the present invention and/or in methods of the present invention, unless otherwise understood from the context. In other words, within this application, embodiments have been described and depicted in a way that enables a clear and concise application to be written and drawn, but it is intended and will be appreciated that embodiments may be variously combined or separated without parting from the present teachings and invention(s). For example, it will be appreciated that all features described and depicted herein can be applicable to all aspects of the invention(s) described and depicted herein.

[0277] It should be understood that the expression “at least one of” includes individually each of the recited objects after the expression and the various combinations of two or more of the recited objects unless otherwise understood from the context and use. The expression “and/or” in connection with three or more recited objects should be understood to have the same meaning unless otherwise understood from the context.

[0278] The use of the term “include,” “includes,” “including,” “have,” “has,” “having,” “contain,” “contains,” or “containing,” including grammatical equivalents thereof, should be understood generally as open-ended and non-limiting, for example, not excluding additional unrecited elements or steps, unless otherwise specifically stated or understood from the context.

[0279] Where the use of the term “about” is before a quantitative value, the present invention also includes the specific quantitative value itself, unless specifically stated otherwise. As used herein, the term “about” refers to a ±10% variation from the nominal value unless otherwise indicated or inferred.

[0280] It should be understood that the order of steps or order for performing certain actions is immaterial so long as the present invention remain operable. Moreover, two or more steps or actions may be conducted simultaneously.

[0281] The use of any and all examples, or exemplary language herein, for example, “such as” or “including,” is intended merely to illustrate better the present invention and does not pose a limitation on the scope of the invention unless claimed. No language in the specification should be construed as indicating any non-claimed element as essential to the practice of the present invention.

### EXAMPLES

### Example 1: Construction and Expression of Recombinant Sialidases

[0282] This example describes the construction of recombinant human sialidases (Neu1, Neu2, Neu3, and Neu4). The human sialidases Neu1, Neu2, Neu3 (isoform 1), and Neu4 (isoform 1) were expressed as secreted proteins with a 10×His tag.

[0283] To express Neu1 as a secreted protein, the native N terminal signal peptide (MTGERPSTALPDRRWGPRILGFWGGCRVWVFAAIFLLLSLAASWSKA; SEQ ID NO: 27) was replaced by MDMRVPAQLLGLLLLWLPGARC (SEQ ID NO: 28), and the C terminal lysosomal signal motif (YGTL; SEQ ID NO: 29) was removed. To express Neu2, Neu3, and Neu4 as secreted proteins, the N terminal signal peptide MDMRVPAQLLGLLLLWLPGARC (SEQ ID NO: 28) was added to each.

[0284] Sialidases were expressed in a 200 mL transfection of HEK293F human cells in 24-well plates using the pCEP4 mammalian expression vector. Sialidases were purified using Ni-NTA columns, quantified with a UV-Vis spectrophotometer (NanoDrop), and examined by SDS-PAGE as shown in FIG. 2. Neu1 expressed well, with a yield of ˜3 μg/ml, and was present primarily in a monomeric form. Neu2 and Neu3 expression each gave yields of ˜0.15 μg/mL and each were present primarily in a dimeric form. Neu4 had no detectable expression yield as measured by NanoDrop. Bacterial sialidase from Salmonella typhimurium (bacterial-sialidase; SEQ ID NO: 30) was expressed in the same manner as Neu1-4 (above) and gave a comparable yield to Neu1, and was present primarily in a monomeric form.

[0285] The activity of the recombinantly expressed sialidases was assayed by measuring the release of sialic acid from the fluorogenic substrate 4-methylumbelliferyl-N-acetylneuraminic acid (4MU-NeuAc). As shown in FIG. 3, Neu1 has no detectable activity beyond a no-enzyme control, which is consistent with previous reports indicating that Neu1 is inactive unless it is in complex with beta-galactosidase and protective protein/cathepsin A (PPCA). Neu2 and Neu3 were active, as was the bacterial sialidase. An enzyme kinetics assay was performed with Neu2 and Neu3. A fixed concentration of enzyme at 1 nM was incubated with fluorogenic substrate 4MU-NeuAc at concentrations ranging from 4000 μM to 7.8 μM. Assays were conducted at both acidic (pH 5.6) and neutral (pH 7) conditions. As shown in FIG. 4, both Neu2 and Neu3 were active at acidic and neutral conditions and showed enzyme kinetics that were comparable to those previously reported.

### Example 2: Construction and Expression of Recombinant Sialidase-Fc Fusion Proteins

[0286] This example describes the construction of recombinant Fc sialidase genetic fusions. In particular, Neu2-Fc, Neu3-Fc and ST sialidase-Fc.

[0287] Fc-sialidases utilizing wild type Neu2 (Neu2-Fc; SEQ ID NO:113, encoded by SEQ ID NO: 114) and a variant Fc-Sialidase designated M106 (SEQ ID NO: 115, encoded by SEQ ID NO: 116) (M1D, V6Y, P62G, A93E, I187K, C332A, and human IgG1 Fc with hole (Y407T) mutation) were expressed, purified and characterized. The Neu2-Fc molecules were expressed in a 1L transfection of Expi293 human cells in using the pCEP4 mammalian expression vector. Neu2-Fc was purified using Protein A, followed by cation exchange chromatography (Hitrap SP-HP, GE Lifesciences). Neu2-Fc had a yield of 0.3 mg/liter, and M106 had a yield of 20 mg/liter.

[0288] FIG. 5A depicts an SDS-PAGE gel showing recombinant wildtype human Neu2-Fc and M106 under non-reducing and reducing conditions. FIGS. 5B-C shows SEC-HPLC traces comparing wildtype Neu2-Fc versus M106. Monomer species have a retention time of 21 mins. Neu2-Fc (FIG. 5B) had an SEC monomer purity of 7% and M106 (FIG. 5C) had an SEC monomer purity of 85%.

[0289] The activity of M106 was assayed by measuring the release of sialic acid from the fluorogenic substrate 4-methylumbelliferyl-N-acetylneuraminic acid (4MU-NeuAc). An enzyme kinetics assay was performed using a fixed concentration of enzyme at 2 μg/well was incubated with fluorogenic substrate 4MU-NeuAc at concentrations ranging from 4 mM to 0.03 μM. FIG. 6 depicts the enzyme activity of M106.

[0290] An FC Sialidase utilizing wild type Neu3 (Neu3-Fc; SEQ ID NO: 117, encoded by SEQ ID NO: 118) was expressed in a 100 ml transfection of Expi293 human cells using the pCEP4 mammalian expression vector. Activity was determined using Neu3-Fc expressing cells (N3-Normal), Neu3-Fc expressing cells treated with tunicamycin (N3-Tunic), and mock transfected cells in both the cell conditioned media (Supernatant) and washed cell pellets. FIG. 7 shows that Neu3-Fc activity was detected in the cell pellet, representing surface bound activity, and that low levels of activity detected in the supernatant, representing secreted Neu3-Fc. Treatment with tunicamycin, an inhibitor of S-acylation and N-glycosylation, did not change the surface associated activity or activity in the supernatant.

[0291] An Fc bacterial sialidase using Salmonella typhimurium (Fc-ST Sialidase) was constructed using a knob in hole-based Fc design. The Fc-ST Sialidase comprised a dimer of two polypeptides: SEQ ID NOs: 119 (pCEP-StSia-G452-hIgG1Fc-Hole, encoded by SEQ ID NO: 121) and SEQ ID NO: 120 (pCEP-StSia-G452-hIgG1Fc-Knob, encoded by SEQ ID NO: 122). Fc-ST Sialidase was expressed in a 1L transfection of Expi293 human cells in using the pCEP4 mammalian expression vector. Fc-ST Sialidase was purified using Protein A, followed by cation exchange chromatography (Hitrap SP-HP, GE Lifesciences). FIG. 8 depicts an SEC-HPLC trace showing that the expressed Fc-ST Sialidase was a monomer species with a retention time of 21 minutes and an SEC monomer purity of 75%.

[0292] The activity of Fc-ST Sialidase was assayed by measuring the release of sialic acid from the fluorogenic substrate 4-methylumbelliferyl-N-acetylneuraminic acid (4MU-NeuAc). An enzyme kinetics assay was performed using a fixed concentration of enzyme at 2 μg/well was incubated with fluorogenic substrate 4MU-NeuAc at concentrations ranging from 4 mM to 0.03 μM. FC ST had an activity approaching 3×10⁸ Fluorescence AU.

### Example 3: In Vivo Administration of Fc Sialidases Reduces Tumor Volume

[0293] This Example shows that in vivo administration of Fc sialidases of the current invention reduce tumor volume in syngeneic mouse tumor models.

[0294] The Fc Salmonella typhimurium sialidase construct (Fc-ST Sialidase) described in Example 2 was compared to Avelumab (anti-PD-L1 antibody) in a mouse syngeneic tumor model injected with a murine lymphoma cancer cell line A20. Female BALB/c mice, 6-8 weeks of age, were inoculated subcutaneously in the right lower flank region with A20 tumor cells (5×10⁵) in 0.1 ml of PBS for tumor development. Mice were randomly allocated to 4 groups of 8 animals each when tumors reached 50-100 mm³, mean ˜75-100 mm³.

[0295] Mice were administered a negative control (“Isotype Control,” FIG. 9A), Fc-ST Sialidase (FIG. 9B), Avelumab (anti-mouse PD-L1 antibody, FIG. 9C), or the combination of Fc-ST Sialidase and Avelumab (FIG. 9D) via intraperitoneal injection of 10 mg/kg twice a week for 15 days and tumor volume (mm³) was measured over time. This example demonstrates that Fc sialidases of the present invention can reduce tumor volume in vivo.

[0296] The Fc-ST Sialidase was evaluated in a second model using a mouse tumor cell line engineered to express human Her2 (EMT6-Her2 cells). Fc-ST Sialidase and the human Neu2 Fc construct M106 (described in Example 2) was compared to trastuzumab (anti-HER2 antibody) in a mouse syngeneic tumor model injected with EMT6-Her2 cells. Female BALB/c mice, 6-8 weeks of age, were inoculated subcutaneously in the right lower flank region with EMT6-Her2 tumor cells (5×10⁵) in 0.1 ml of PBS for tumor development. Mice were randomly allocated to 4 groups of 8 animals each when tumors reached 50-100 mm³, mean ˜75-100 mm³.

[0297] Mice were administered isotype control (Vehicle Control, FIG. 10A), Fc-ST Sialidase (FC-ST, FIG. 10B), trastuzumab (anti human Her2 antibody, FIG. 10C), or Fc human Sialidase (M106, FIG. 10D) via intraperitoneal injection at 10 mg/kg twice a week for 15 days, as indicated by the triangles, and tumor volume was measured over time. This example demonstrates that Fc sialidases of the present invention can reduce tumor volume in vivo.

### Example 4: Divalent Cations can Stabilize the Activity of Sialidases

[0298] This example describes the ability of divalent cations, and in particular calcium, to stabilize the activity of sialidases of the present invention. In particular, an Fc Neu2 Sialidase (SEQ ID NO:123) (M1D, V6Y, I187K, C332A) was expressed along with the heavy and light chain of trastuzumab (including a first polypeptide chain with amino acid sequence SEQ ID NO: 124, encoded by nucleotide sequence SEQ ID NO: 125, a second polypeptide chain with amino acid sequence SEQ ID NO: 126, encoded by nucleotide sequence SEQ ID NO: 127, and a third polypeptide chain with amino acid sequence SEQ ID NO: 123, encoded by nucleotide sequence SEQ ID NO: 128).

[0299] Purified protein in PBS or PBS with 4 mM CaCl₂ was incubated at 37° C. for up to 2 weeks. Samples containing about 2 μg of protein were assayed by measuring the release of sialic acid from the fluorogenic substrate 4-methylumbelliferyl-N-acetylneuraminic acid (4MU-NeuAc). Assays were done following 4 hours and days 1, 3, 7 and 14 at 37° C. The results are shown in FIG. 11. As can be seen, the addition of CaCl₂ to the enzyme preparation greatly stabilized the enzyme activity.

[0300] To see if CaCl₂ could stabilize enzyme activity during expression in mammalian cells, 4 mM CaCl₂ was added to transiently transfected Expi293 cell expression media starting 24 hours after transfection. As shown in FIG. 12A, the addition of CaCl₂ greatly increased the amount of secreted enzyme activity through day 7. However, as shown in FIG. 12B, 4 mM CaCl₂) led to a decrease in cell viability.

[0301] To optimize a CaCl₂ concentration that can stabilize enzyme activity but maintain cell viability, five concentrations of CaCl₂ ranging from 0.05 mM, 0.5 mM, 1 mM, 2 mM and 4 mM were added at day 1 following transfection. Conditioned media was collected over a three day time course on days 4-6 and enzymatic activity (and thus viability) determined as shown in FIG. 13A. Protein yield was also measured (FIG. 13B). It was found that 4 mM CaCl₂ stabilized activity and gave a moderate yield, but gave poor viability. It was found that, under the conditions tested, the use of 0.5 mM CaCl₂ maintained the activity of the sialidase, provided a higher protein yield and was less toxic to cells.

### Example 5: Sialoglycan Profiles of Subsets of Human PBMCs

[0302] This example describes the sialoglycan profile on different subsets of human peripheral blood mononuclear cells (PBMCs) using flow cytometry. Sialoglycans present on immune cell surfaces play important roles in maintaining homeostasis. Imbalance in sialoglycan profile on immune cells is documented in autoimmunity, mechanisms of immune surveillance escape by tumor cells and so forth.

[0303] Following isolation of PBMCs using a Ficoll method, cells were washed twice with ice cold PBS using a tabletop centrifuge at 350×g for 5 minutes, cells were counted using Countess™ II Automated Cell Counter (Thermo Fisher Scientific, Waltham, Mass.) and 250K cells were aliquoted into each well of a 96-well plate. Fc blocking solution containing Human Trustain FcX (1/20 dilution) and LIVE/DEAD™ Fixable Near-IR Dead Cell Stain (1/2000 dilution) in PBS was prepared and cells were incubated for 10 minutes on ice. Cells were washed using ice-cold PBS (1% BSA) at 350×g for 5 min. Cell surface sialoglycan staining was performed using Hydra and lectin reagents as shown in TABLE 10. Hydra-3, Hydra-7 and Hydra-9 are hexameric versions of the extracellular domain of human Siglec 3, Siglec 7, and Siglec 9, respectively, (as described in International (PCT) Application Publication No. WO2019/237070). Lectins used included Biotinylated Sambucus Nigra (SNA, Vector Laboratories, B-1305-2), Biotinylated Machia Amurensis (MAL-II, Vector Laboratories, B-1265-1) and Biotinylated Peanut Agglutinin (PNA, Vector Laboratories, B-1075-5). SNA is a lectin that preferentially binds to sialic acid attached to terminal galactose in α-2,6 and to a lesser degree, α-2,3 linkage. MAL-II is a lectin that binds to sialic acid in an α-2,3 linkage. PNA is a lectin that binds to terminal galactose residues. An increase in PNA staining can be indicative of the removal of terminal sialic acids by a sialidase and exposure of the underlying galactose.

TABLE 10

| | | Working | | |
|---|---|---|---|---|
| Reagent | Stock | conc. | | Buffer |
| Hydra-3 | Varies | 250 | nM | FACS staining |
| | | | | buffer |
| Hydra-7 | Varies | 25 | nM | FACS staining |
| | | | | buffer |
| Hydra-9 | Varies | 75 | nM | FACS staining |
| | | | | buffer |
| MAL-II | 1 mg/mL | 2 | μg/mL | PBS |
| PNA | 5 mg/mL | 1 | μg/mL | FACS staining |
| | | | | buffer |
| SNA | 2 mg/mL | 0.5 | μg/mL | FACS staining |

buffer

[0304] PBMCs were incubated with the various Hydra and lectin reagents on ice for 30 minutes. Cells were washed using 150 μL of PBS (1% BSA) into each well and centrifuged at 350×g for 5 minutes. Plate solution was quickly decanted. AF-647 goat anti-mouse IgG was used with a 1/2000 dilution in PBS as a secondary stain for Hydra reagents (Hydra-7 and Hydra-9). Streptavidin conjugated Alexa Fluor 647 was used at a dilution of 1/2000 in PBS as a secondary stain for lectin reagents (PNA, MAL-II and SNA). Cells were incubated for 15 minutes on ice. Cell lineage-specific staining was performed as shown in TABLE 11 with indicated antibodies. All antibodies were purchased from Biolegend® (San Diego, Calif.) with the exception of Live Dead stain, which was purchased from Thermo Fisher Scientific (Waltham, Mass.).

TABLE 11

| Marker | Fluorochrome | Clone | Cat no. | Marker for |
|---|---|---|---|---|
| CD3 | PE | UCHTI | 300441 | Pan-T cells |
| PNA/Hydra/ | APC/AF647 | N/A | N/A | |
| MAL-II | | | | |
| CD14 | BV421 | MSE2 | 301830 | Myeloid in |
| | | | | PBLs |
| HLA-DR | PerCPcy5.5 | L243 | 307628 | |
| CD 163 | BV510 | GH1/61 | 333628 | |
| CD4 | BV605 | SK3 | 344646 | CD4+T |
| CD56 | BV650 | 5.1H11 | 362532 | NK |
| CD8 | BV786 | SKI | 344740 | CD8+T |
| CD20 | PE-Cy-7 | 2H7 | 302312 | B cell |
| Live dead | APC-Cy-7 | N/A | L34975 | |
| CD11c | APC-R-700 | Bul5 | 337220 | |

[0305] A master mix was prepared using the reagents in TABLE 11 in FACS staining buffer (“stain mix”) and 30 μg of stain mix was aliquoted into each well/tube for a final active antibody concentration ˜1 μg/ml. Cells were incubated on ice for 15 minutes. In addition, individual cellular compensation controls were prepared. Cells were washed with PBS (1% BSA) and resuspended in 4% paraformaldehyde at room temperature for 10 min. Cells were washed twice using PBS, and pellets were resuspended in 150 μl PBS. Samples were run using a flow cytometer (BD FACSCelesta™ (BD Biosciences)).

[0306] Human PBMCs from two different healthy donors were stained with Hydra-3, Hydra-7 and Hydra-9, as depicted in FIG. 14 (black and grey bars represent the two donors). As shown, monocytes and DC cell populations exhibit increased Hydra-9 staining in comparison with other cell populations (FIG. 14A). Monocytes and DC cell populations exhibit increased Hydra-7 staining in comparison with other cell populations (FIG. 14B). One donor demonstrated increased Hydra-7 staining on CD4+ T cells. Monocytes and DC cell populations exhibited increased Hydra-3 staining in comparison with other cell populations (FIG. 14C). One donor demonstrated increased Hydra-3 staining on CD4+ T cells.

[0307] Lectin staining (MAL-II, PNA and SNA) of human PBMCs from healthy donors is depicted in FIG. 15 (black and grey bars represent two independent donors). As shown, PNA staining is relatively low in comparison with Hydra-9 staining (see scale of Y-axis in comparison to FIG. 14) but specific for monocytes and DCs (FIG. 15A). MAL-II stains most of the immune cell populations (FIG. 15B). T cells (CD4+ and CD8+) exhibit increased MAL-II staining as compared to other cell populations. SNA stains most of the immune cell populations (FIG. 15C), with NK cells exhibiting less SNA staining in comparison with other cell populations.

### Example 6: Sialidases Efficiently Desialylate Dendritic Cells (DCs)

[0308] This example demonstrates the desialylation efficiency of sialidase molecules of the current invention on human monocyte-derived dendritic cells (DCs).

[0309] DCs are known to express high levels of Siglecs (sialic acid-binding immunoglobulin-like lectins, e.g., Siglec-3, -7, and -9), which inhibit the NK cell-mediated killing of tumor cells. Additionally, DCs express numerous sialoglycans that are ligands for Siglec molecules, as demonstrated in the previous example. Interactions of the Siglecs on DCs with sialoglycans, either on the same cell or on another interacting cell (e.g., a cancer cell), regulate DC activation.

[0310] PBMCs were isolated from leukopaks (blood samples enriched in PBMCs) using a standard Ficoll density gradient method. After PBMC isolation, the cells were washed twice with cold autoMACS® rinsing solution (containing 5% BSA; Miltenyi Biotec) by centrifuging at 350×g for 5 minutes. CD14+ monocytes were magnetically purified using CD14 microbeads (Miltenyi Biotec) and differentiated into dendritic cells. Specifically, CD14+ cells were resuspended in complete medium (10% FBS-containing RPMI media) containing 50 ng/ml of recombinant human GM-CSF and 50 ng/mL of recombinant human IL-4 at a concentration of 0.8 cells×10⁶/mL. On Day 0, the cells were plated in 6-well plates with 3 ml of cell suspension per well (2.4×10⁶ cells/well). At Day 3 and Day 6, half of the medium from each well was removed, taking care not to disturb the loosely attached cells. Each well was replenished with 1.5 mL of fresh medium containing 100 ng/mL each of rhGM-CSF and rhIL-4. At Day 7, the differentiated DCs were harvested by gentle flushing with medium, washed once with complete medium and resuspended at 2×10⁶/mL.

[0311] For the desialylation assay, M106 (M1D, V6Y, P62G, A93E, I187K, C332A, and human IgG1 Fc with hole (Y407T) mutation and an EPKSS (SEQ ID NO: 163) linker) (SEQ ID NO: 152, encoded by SEQ ID NO: 193) was used. This is construct is as described in Example 2, but with an EPKSS (SEQ ID NO: 163) linker instead of a GGGGSGGGGS (SEQ ID NO: 162) linker. The term “M106: used in the Examples going forward refers to this construct. In addition, a Neu2-FC variant termed LOF (M1D, V6Y, K9D, I187K, C332A, A93E, V363R, L365R, E218A, C219N, and human IgG1 Fc with hole (Y407T) mutation (SEQ ID NO: 175, encoded by SEQ ID NO: 176)) was used as a negative control. 100,000 DCs per well were plated out in a 96-well U bottom format, with 200 μl dispensed per well. LPS was used where indicated at 0.3 ng/mL, and M106 and LOF constructs were used at the following concentrations (in μg/mL): 0, 6.25, 12.5, 25, 50 and 100. DCs were incubated overnight (16 hours) followed by flow analysis of CD83, CD86 and MHCII (HLA-DR). Desialylation was measured by PNA staining as described in Example 5.

[0312] After incubation, the plates were centrifuged at 350×g for 4 minutes and the medium was removed. Cells were washed once with FACS staining buffer. Cells were blocked and stained for dead cells simultaneously by adding 100 μl of solution containing Human Trustain FcX (1/20 dilution) and LIVE/DEAD™ Fixable Near-IR Dead Cell Stain (1/2000 dilution) in PBS and incubating on ice for 10 minutes. Cells were centrifuged and washed once with FACS buffer. 50 μL of PNA-biotin (1 μg/mL in FACS staining buffer) was added to each well and incubated on ice for 10 minutes. Cells were centrifuged and washed twice with FACS buffer. 50 μL of the antibody cocktail (described in TABLE 12 below) including Streptavidin Alexa Fluor™ 647 was added to each well and incubated on ice for 30 minutes. After incubation, the cells were washed twice with 150 μL of FACS buffer and resuspended in 125 μL of FACS buffer for flow cytometric acquisition. The flow cytometric data was acquired on a flow cytometer (BD FACSCelesta™ (BD Biosciences)) using a HTS (High Throughput Sampler) option. After data acquisition signals were analyzed using FlowJo flow analysis software (BD Biosciences).

TABLE 12

| | | | Dilution/Concentration |
|---|---|---|---|
| Reagent | Vendor | Cat# | used |
| PNA | Vector Labs | NB-1075-5 | 1 μg/mL |
| Streptavidin Alexa | Thermo | S21734 | 1/2000 |
| Fluor 647 | Fisher | | |
| LIVE/DEAD ™ | Thermo | L34976 | 1/2000 |
| Fixable Near-IR | Fisher | | |
| Dead Cell Stain | | | |
| Anti-CD209-FITC | Biolegend ® | 330104 | 1/25 |
| Anti-CD83-PE | Biolegend ® | 305308 | 1/25 |
| Anti-HLA-DR-PE- | Biolegend ® | 307616 | 1/100 |
| Cy7 | | | |
| Anti-CD11c-Alexa | Biolegend ® | 337220 | 1/50 |
| Fluor 700 | | | |
| Anti-CD86-Brilliant | Biolegend ® | 305442 | 1/50 |
| Violet 785 | | | |

[0313] FIG. 16 depicts the degree of desialylation of DCs by M106 based on PNA staining. An increase in PNA staining is indicative of removal of the terminal sialic acid, exposing the underlying galactose residues recognized by the PNA lectin. FIG. 16A shows the increase in fluorescence (MFI), indicative of PNA staining, with increasing M106 concentration. FIG. 16B shows the fold increase in PNA signal as compared to untreated DCs. A clear dose-dependent increase in PNA signal was observed indicating a robust desialylation of the DCs.

[0314] Taken together, this example shows that M106 causes a robust desialylation of DCs in a dose-dependent manner.

### Example 7: Desialylation of Tumor Cell Lines by Sialidases

[0315] Sialoglycans play role in maintaining tolerance and homeostasis in human physiological conditions. Overexpression of sialoglycans is observed in tumor cell lines. This example demonstrates the ability of M106 to desialylate tumor cell lines BT-20, SKBR-3, HT-29 as determined by Hydra-9 and lectin staining.

[0316] BT-20 and HT-29 cells were grown to 70-80% confluence on plates using appropriate media. Cells were dissociated using Accutase® (Innovative Cell Technologies, Inc.), an enzyme mixture containing proteolytic and collagenolytic enzyme activity, by incubating the plates at 37° C. for 15 minutes. When the cells were dissociated, an equal volume of complete media was added to neutralize Accutase®. The cell suspension was transferred and centrifuged at 300×g for 5 min. The supernatant was discarded and cells were washed twice with cold PBS. Cells were counted and resuspended in media at 1×10⁶ cells per ml. M106 and LOF were added at varying dilutions to cells. Cells were incubated for 10 hours at 37° C. After the incubation, cells were washed with PBS and transferred to 96-well round bottom plates for staining. Staining was performed with Hydra-9 and PNA as in Example 5.

[0317] FIG. 17 depicts the degree of desialylation of BT-20 cells following treatment with M106 (triangles) or LOF control (squares) as determined by loss of Hydra 9 binding (FIG. 17A) or increase in PNA staining (FIG. 17B), as measured by fluorescence (gMFI). An IC50 for desialylation by M106 was 3.088 μg/mL for Hydra 9 and 58.75 μg/mL for SNA. FIG. 18 depicts the degree of desialylation of BT-20 cells following treatment with M106 (triangles) or LOF control (squares) as determined by loss of Hydra 9 binding (FIG. 18A) or increase in PNA staining (FIG. 18B), as measured by fluorescence (gMFI). The IC50 for desialylation by Neu2-Fc variant M106 was 2.95 μg/ml for Hydra 9 and 131.5 μg/mL for SNA.

[0318] A similar experiment was performed with SKBR-3 cells, in which cells were stained with MAL-II lectin in addition to Hydra 9 and PNA. For MAL-II staining, a final concentration of 2 μg/mL in PBS was used and cells were stained for 10 minutes at room temperature. FIG. 19 depicts the degree of desialylation of SKBR-3 cells following treatment with M106 (triangles) or LOF control (circles) as determined by loss of Hydra 9 binding (FIG. 19A), loss of MAL-II staining (FIG. 19B) or increase in PNA staining (FIG. 19C), as measured by fluorescence. An IC50 for desialylation by M106 was 4.4 μg/ml with Hydra 9, approximately 120 μg/mL for MAL-II and 22 μg/ml for SNA.

[0319] Taken together, this example shows that M106 demonstrated a dose dependent removal of cell surface sialic acid from tumor cells. Loss of Hydra 9 staining is a more sensitive indicator with EC50s around 3 to 4 ug/mL of M106 as compared to loss of MAL II staining or gain of PNA staining.

### Example 8: Desialylation of Tumor Cell Lines by Sialidases Enhances Human Dendritic Cell Activation

[0320] Sialoglycans play role in maintaining tolerance and homeostasis in human physiological conditions. Although overexpression of sialoglycans is observed in tumor cell lines, the resulting sialoglycans can be removed using sialidases of the present invention as shown in the previous examples. This example demonstrates the effect of desialylation of tumor cell lines on dendritic cell activity.

[0321] Briefly, dendritic cells (DCs) were generated from CD14+ monocytes isolated from PBMCs of healthy donors. CD14+ cells were magnetically purified using manufacturer's protocol (Miltenyi Cat #130-050-201). The purified cells were then cultured for 7 days in presence of GM-CSF (R&D Systems Cat #7954-GM/CF) and IL-4 (R&D Systems Cat #6507-IL/CF) to generate immature DCs.

[0322] On the day of the experiment, SKBR-3 tumor cells were harvested from T-75 flasks using Accutase® and washed twice with 10% FBS McCoy's 5A medium. The cells were then resuspended at 5×10⁶/mL of 10% FBS McCoy's 5A medium. 100 μg/mL of M106 was added to the sample and incubated at 37° C. for 4 hours. The no treatment group was treated identically except for the addition of M106 to the tube. After 4 hours, the cells were washed twice with 10% FBS McCoy's 5A medium and resuspended at 2×10⁶/mL in complete medium (10% FBS RPMI). 50 μl (100,000 DCs) of the suspension was added to the designated wells.

[0323] DCs were harvested, washed in complete medium (10% FBS RPMI) and resuspended at 2×10⁶/ml. 50 μL (100,000 DCs) of the suspension was added to the designated wells.

[0324] LPS (InvivoGen Cat # tlrl-pb5lps) was added to a final concentration of 0.3 ng/mL. Complete medium (10% FBS RPMI) was added where needed to reach a final volume of 200 μL per well. The assay plate was incubated overnight at 37° C. On the following day, the cells were washed with staining buffer and stained for DC markers (CD11c, CD209, CD1c, CD83, CD86 and HLA-DR). The desialylation of the tumor cells was confirmed by staining with Hydra-9 as described in Example 6.

[0325] FIG. 20 depicts the effects of dendritic cell activation under various conditions as determined by CD83hi expression (FIG. 20A) or CD86hi expression (FIG. 20B). Untreated DCs (“No Tx”) have a low percentage of CD83hi and CD86hi. Addition of LPS to the DCs strongly induces activation, as shown by an increased percentage of CD83hi and CD86hi (“LPS”). LPS-induced expression of both CD83 and CD86 was inhibited when DCs were co-incubated with untreated SKBR-3 tumor cells (see horizontal line in FIGS. 20A and 20B). The inhibition of DCs by SKBR-3 tumor cells is reversed following desialylation of the SKBR-3 tumor cells by M106 prior to co-incubation with DCs and LPS (“LPS+M106 FC”). In addition, sialidase treatment slightly enhances activation of DCs in the absence of LPS (compare no treatment and untreated SKBR-3 tumor cells to M106-treated SKBR-3 tumor cells (“M106 FC”)).

[0326] This example demonstrates that desialylation of tumor cells can reverse the sialoglycan-induced immunosuppression of DCs which suggests that desialylation of tumor cells can lead to a stronger anti-tumor response.

### Example 9: Effect of Sialidases on Phagocytosis of Tumor Cells by Macrophages

[0327] Sialoglycans present on immune cell surfaces play important roles in maintaining homeostasis. This example demonstrates the effect of sialidases of the present invention on phagocytosis of HT-29 tumor cells by M2-like human macrophages.

[0328] PBMCs from whole blood of human volunteers were isolated by a Ficoll method. CD14+ monocytes were magnetically purified using CD14 microbeads. Monocytes were differentiated into M2-like macrophages by resuspending CD14+ cells in RPMI media (10% FBS) at a concentration of 1×10⁶/mL with 50 ng/mL of recombinant human M-CSF. On Day 0, the cells were plated in 150 mm tissue culture plates in 20 mL volume (˜20×10⁶ cells seeded per plate). At Day 3 and Day 6, half of the medium from each well was removed, taking care not to disturb the attached cells. M-CSF was replenished to a final concentration of 50 ng/mL. On Day 7, the supernatant media was collected in 50 mL tubes and the plate was gently washed with 20 mL PBS. 20 mL Accutase® was added and plates were incubated for 20 minutes to dissociate cells from the plate. Cells were resuspended in complete RPMI media supplemented with 10% FBS and non-essential amino acids (NEAA), sodium pyruvate and HEPES with 10 ng/ml M-CSF, and seeded at 50K cells/well/100 μL in flat bottom 96-well plate.

[0329] HT-29 cells were harvested from flask using Accutase®. Cells were washed with PBS. Cells were labelled with Cell Trace™ CFSE labelling dye (FITC) conjugate (Thermo Fisher) at a 1:1000 dilution by volume (final concentration of 10 Cells were incubated at room temperature for 10 minutes and the labelling reaction was quenched by adding an equal volume of chilled FBS. Cells were washed twice and resuspended in media (10% FBS supplemented McCoy's media) at 1.2×10⁶/ml cells. M106 and LOF were added at a top concentration of 100 μg/ml followed by 2-fold dilutions. A no treatment control group was reserved with untreated HT-29 cells. Cells were incubated at 37° C. for ˜20 hours.

[0330] Following the incubation, cells were spun down, washed with PBS, and resuspended into complete RPMI (10% FBS) media at a final cell density of 2.5×10⁶ cells/mL. 100 μL HT-29 cell suspension was added to M2-like macrophages in appropriate wells at a macrophage: tumor cell ratio of 1:5 (E:T). Plates with macrophage and tumor cells were incubated for 2 hours to allow for phagocytosis. After 2 hours, the media was gently removed using multi-channel pipette and 200 μL of Accutase® was added to the plates incubated for 45 minutes on ice to detach both HT-29 and macrophages from the plate. The cells were resuspended and collected in a new 96-well bottom plate. The plates were spun down, the supernatant was discarded, and the cell pellets were washed in 200 μL of PBS.

[0331] Cell pellets were resuspended and blocked using Human Trustain Fc blocker on ice for 5-7 minutes. After incubation, cells were washed with PBS. Cells were stained for CD45 and CD14 fluorochrome markers as below in TABLE 13. Antibodies were purchased from Biolegend®.

TABLE 13

| Marker | Fluorochrome | Clone | Cat no. | Marker for |
|---|---|---|---|---|
| CD14 | BV421 | MSE2 | 301830 | Macrophages |
| CD45 | APC | 2D1 | 368512 | Macrophages |

[0332] A master mix was made in FACS staining buffer with staining antibodies added at 1:30 dilution. 30 μl of master mix was added/well. Appropriate compensation controls (e.g., single color staining controls for compensation as per standard flow cytometry practice for multi-color flow cytometry) were stained in parallel. Cells were incubated on ice for 15 minutes and then washed with PBS at 350 g for 8 minutes. The cells were then fixed with 4% formaldehyde for 10 minutes at room temperature and afterwards washed twice with PBS. Cells were resuspended in 150 μL of PBS and run on a flow cytometer (BD FACSCelesta™ (BD Biosciences)).

[0333] The percentage of CFSE-positive, CD14+CD45+ macrophages were determined. CFSE-positive, CD14+CD45+ macrophages are indicative of percentage phagocytosis of tumor cells by macrophages, because CFSE-positive tumor cells that are phagocytosed by CD14+CD45+ macrophages are CFSE positive.

[0334] FIG. 21 depicts the dose dependent enhancement of phagocytosis of desialylated HT-29 tumor cells by M2 like macrophages derived from two different healthy donors (FIG. 21A and FIG. 21B). HT-29 pretreated with sialidase at concentrations above 25 μg/mL demonstrated a reproducible increase in phagocytosis by macrophages. A similar increase in phagocytosis of desialylated BT20 and SKBR-3 tumor cells by M2-like macrophages was observed (FIG. 21C and FIG. 21D respectively).

[0335] Accordingly, treating tumor cells with a sialidase as described herein resulted in an increase in phagocytosis of the tumor cells by macrophages.

### Example 10: Sialidase Treatment Enhances MHC Class-II Expression on Monocytes

[0336] This example demonstrates the effect of sialidases of the current invention on MHC class-II (HLA-DR) expression on monocytes. MHC-II expression represents antigen presentation capacity on the monocytes. Enhanced class-II expression is indicative of enhanced antigen presentation to T cells to generate an effective immune response.

[0337] PBMCs were isolated from healthy volunteers using Ficoll method and cells were washed twice with ice cold PBS using a tabletop centrifuge at 350×g for 10 minutes. Cells were resuspended in media and counted using a Countess™ II Automated Cell Counter. The final suspension was adjusted to 2.5×10⁶ cells/L. About 250,000 cells (100 μL) were seeded in 96-well round bottom plates. The cells were incubated with M106 or LOF at a top concentration of 50 μg/mL, with 2-fold dilutions. A no treatment group was included. The cells were incubated for 18 hours at 37° C. The plates were spun at 350×g for 10 minutes. Cell pellets were washed with cold PBS, and subjected to blocking and staining steps using the FACS staining panel described in TABLE 14. All antibodies were purchased from Biolegend® with the exception of Live Dead stain, which was purchased from Thermo Fisher. Sialoglycan staining was performed using PNA lectin as confirmation of desialylation using the methods described in Example 7.

TABLE 14

| Marker | Fluorochrome | Clone | Cat no. | Marker for |
|---|---|---|---|---|
| CD3 | PE | UCHT1 | 300441 | Pan-T cells |
| PNA | APC | N/A | | Glycosylation |
| | | | | specific Lectin |
| CD14 | BV421 | MSE2 | 301830 | Myeloid in |
| | | | | PBLs |
| CD19 | PerCPcy5.5 | HIB19 | 302230 | B cell |
| CD163 | BV510 | GH1/61 | 333628 | |
| CD4 | BV605 | SK3 | 344646 | CD4+ T |
| CD56 | BV650 | 5.1H11 | 362532 | NK |
| CD8 | BV786 | SK1 | 344740 | CD8+ T |
| HLA-DR+ | PE-Cy-7 | L243 | 307628 | |
| Live dead | APC-Cy-7 | N/A | L34975 | |
| CD11c | APC-R-700 | Bu15 | 337220 | |

[0338] FIG. 22 depicts the dose dependent enhancement of HLA-DR expression following M106 desialylation compared to LOF in monocytes from two different healthy donor (FIG. 22A and FIG. 22B).

[0339] Accordingly, this example shows that desialylation of monocytes by a sialidase described herein leads to an increased MHC class-II (HLA-DR) expression on monocytes. MHC-II expression represents antigen presentation capacity on the monocytes. Thus, enhanced class-II expression is indicative of enhanced antigen presentation to T cells, which can enhance the ability of T cells to generate an effective immune response.

### Example 11: Sialidase Treatment does not Result in Adverse Cytokine Release

[0340] Conditioned media from PBMCs incubated with M106 or LOF was assayed for stimulation of cytokine release. LPS (1 ng/mL) was used as a positive control. M106 (as well as LOF) treatment of PBMCs demonstrated no increase across all treatment doses of TNF-alpha, IL-6, IL-1beta, IL-1RA or IL-10 in two independent donors as measured by LEGENDplex™ Human M1/M2 Macrophage Panel (10-plex; BioLegend®). In contrast, LPS demonstrated a clear cytokine induction. These results demonstrate that sialidase treatment of PBMCs does not result in adverse cytokine release.

### Example 12: Sialidase Treatment Leads to Complete and Partial Remission of Tumor Growth Alone and in Combination with an Anti-PD-1 Antibody

[0341] This example shows that in vivo administration of sialidases of the present invention can result in complete and partial remission of tumor growth in various mouse syngeneic tumor models.

[0342] Sialidase treatment alone and in combination with other cancer treatments were tested using the MC38 colon cancer cell model. Each mouse was inoculated subcutaneously in the right lower flank region with 5×10⁵ tumor cells in 0.1 mL of PBS to induce tumor development. Mice were randomized when the mean tumor size reached approximately 50 mm³. 32 mice were randomly allocated to 4 study groups. The mice were dosed with either M106, anti-mouse PD-1, a combination of Neu2-Fc variant M106 and anti-PD-1 or isotype control at 10 mg/kg of each agent twice per week for 5 doses. FIG. 23 depicts the tumor growth for each mouse in either the isotype control group (FIG. 23A), M106 group (FIG. 23B), anti-PD-1 group (FIG. 23C) or a combination of M106 and anti-PD-1 (FIG. 23D). M106-treated mice demonstrated complete remission (CR) of tumor growth in one animal compared to no mice responding in the isotype treated group. The combination of M106 and anti-PD-1 demonstrated 1 CR and 1 partial response (PR) as well as an overall reduction in tumor growth in all mice compared to isotype control.

[0343] Next, sialidase treatment alone and in combination with other cancer treatments were tested using the B16F10 melanoma cancer cell model. Each mouse was inoculated subcutaneously in the right lower flank region with 5×10⁵ tumor cells in 0.1 mL of PBS for tumor development. Mice were randomized when the mean tumor size reached approximately 50 mm³. 24 mice were randomly allocated to 3 study groups. The mice were dosed with either M106, anti-mouse PD-1 or isotype control at 10 mg/kg twice per week for 5 doses. FIG. 24 depicts the tumor growth for each mouse in either the isotype control group (FIG. 24A), M106 group (FIG. 24B) or anti-PD-1 group (FIG. 24C). FIG. 24D is an overlay of the isotype control group on the M106 group demonstrating a clear benefit of M106 in reducing tumor growth in what is considered a difficult-to-treat tumor model.

[0344] Next, sialidase treatment alone and in combination with other cancer treatments were tested using the cell line EMT6 expressing human Her2 as a polyclonal cell line. Each mouse was inoculated subcutaneously in the right lower flank region with 5×10⁵ tumor cells in 0.1 mL of PBS for tumor development. The mice were randomized when the mean tumor size reached approximately 100 mm³. 16 mice were randomly allocated to 2 study groups. The mice were dosed with either M106 or isotype control at 10 mg/kg twice per week for 5 doses. FIG. 25 depicts the tumor growth for each mouse in either the isotype control group (FIG. 25A) or M106 FC group (FIG. 25B). 4 out of 8 M106-treated mice demonstrated complete remissions (CR) of tumor growth compared to only 1 out of 8 mice in the isotype treated group.

[0345] Accordingly, as demonstrated in this example, treatment with the sialidases disclosed herein leads to the reduction in cancer growth and, in some instances, complete remission, in a variety of cancer types.

### Example 13: Sialidase Treatment Leads to Complete and Partial Remission of Tumor Growth Alone and in Combination with an Anti-PD-L1 Antibody

[0346] This example describes in vivo testing of M106 and/or avelumab (anti-PD-L1) in an A20 syngeneic mouse model. Mouse A20 cells express endogenous mouse PD-L1 which is bound by avelumab. Female Balb/c mice, 5-6 weeks of age, were inoculated subcutaneously in the right lower flank region with murine A20 B cell lymphoma cells in matrigel (1:1 by volume). Mice were randomly allocated into groups of 8 mice when tumors reached approximately 100 mm³ (the average tumor volume of each group ranged from 86 to 90 mm³). TABLE 15 describes the various arms of the study. The mice were treated intraperitoneally with 5 or 10 mg/kg M106, avelumab, and/or antibody isotype control (as indicated) twice a week for a total of 5 doses. Tumor volumes and body weights were recorded three times a week.

TABLE 15

| Group | No. Mice | Treatment | Dose | Schedule |
|---|---|---|---|---|
| 1 | 8 | Isotype control | 10 mg/kg | Twice weekly for 5 |
| | | | | doses |
| 2 | 8 | Avelumab | 5 mg/kg | Twice weekly for 5 |
| | | | | doses |
| 3 | 8 | Avelumab | 10 mg/kg | Twice weekly for 5 |
| | | | | doses |
| 4 | 8 | M106-Fc | 10 mg/kg | Twice weekly for 5 |
| | | | | doses |
| 5 | 8 | Avelumab in | 10 mg/kg | Twice weekly for 5 |
| | | combination | each | doses |
| | | with M106-FC | | |

[0347] FIG. 26 depicts the tumor growth in each mouse in each of the groups. Complete responders (CR) and partial responders (PR) for each group are shown. As can be seen, M106 demonstrated anti-tumor activity alone and in combination with avelumab (“Ave”).

[0348] Mice with tumors that demonstrated CR from M106 treatment groups (alone or in combination with avelumab) were grouped and rechallenged with murine A20 cells (all approximately 12 weeks of age) and compared to naïve control mice injected with A20 cells of either 6 or 12 weeks of age. Tumor volumes and body weights were recorded three times a week. Tumors grew as expected in both the 6 week and 12 week naïve mice, no tumor growth was observed in the rechallenged mice (data not shown.)

[0349] Accordingly, as demonstrated in this example, treatment with a sialidase disclosed herein leads to the reduction in cancer growth and, in some instances, complete remission, in a B cell lymphoma model.

### Example 14: Sialidase Treatment Leads to Complete and Partial Remission of Tumor Growth Alone and in Combination with an Anti-PD-L1 Antibody

[0350] This example describes in vivo testing of M106 and/or avelumab (anti-PD-L1) in an A20 syngeneic mouse model. The experiment was performed as in Example 13, except that 6 doses were given (twice weekly for 3 weeks). TABLE 16 describes the various arms of the study. Mice were treated intraperitoneally with 10 mg/kg M106, avelumab and/or antibody isotype control twice a week for a total of 6 doses. Tumor volumes and body weights were recorded three times a week.

TABLE 16

| Group | Treatment | Route/dose | Schedule |
|---|---|---|---|
| 1 | Isotype | 10 mg/kg IP | Twice weekly |
| 2 | Avelumab | 10 mg/kg IP | for 3 weeks |
| 3 | Avelumab + M106 FC | 10 mg/kg IP + 10 mg/kg IP | |
| 4 | M106 FC | 10 mg/kg IP | |

[0351] FIG. 27 depicts the results of tumor growth in each mouse in each of the groups. The avelumab-based ASCs demonstrated varying degrees of efficacy. As in Example 13, M106 demonstrated activity as does M106 combined with avelumab.

[0352] Accordingly, as demonstrated in this example, treatment with a sialidase disclosed herein, alone or in combination with an anti-PD-L1 antibody, leads to the reduction in cancer growth and, in some instances, complete remission, in a B cell lymphoma model.

### Example 15: Sialidase Treatment Leads to Improved Survival in Combination with an Anti-CD20 Antibody in Tumor-Bearing Mice

[0353] This Example describes the in vivo administration of M106 in combination with an anti-CD20 antibody (ofatumumab) in a mouse syngeneic intravenous dissemination model using a murine breast cancer cell line expressing human CD20 (EL4 CD20 cells). Female C57/BL6 mice, 6-8 weeks of age, were IV injected with 500,000 cells per mouse. Mice were subsequently dosed as described in TABLE 17 with isotype control, ofatumumab, an or a combination of ofatumumab and M106. Body weights and clinical observations were recorded daily.

TABLE 17

| | # of | | Dose | Tumor | | Dose volume | |
|---|---|---|---|---|---|---|---|
| Group | mice | Treatment | (mg/kg) | route | Route | mL/kg | Schedule |
| 1 | 10 | Isotype control | 10 | IV | IP | 5 | Twice weekly |
| | | | | | | | for 4 doses |
| 2 | 20 | Ofatumumab | 10 | IV | IP | 10 | Twice weekly |
| | | | | | | | for 4 doses |
| 5 | 20 | Ofatumumab | 10 each | IV | IP | 10 and 5 | Twice weekly |
| | | and M106 | | | | | for 4 doses |

[0354] FIG. 28 depicts survival curves for mice in each group. FIG. 28A depicts the survival as of day 28 and FIG. 28B depicts the overall survival (as of day 41). Compared to isotype control, mice treated with ofatumumab demonstrated a shift in survival, with the 50% survival point shifting from 17 days to 24 days. Mice treated with a combination of ofatumumab and M106 demonstrated an even greater shift in survival to 30 days.

[0355] Accordingly, this example showed that treatment with a sialidase of the invention led to increased survival in mice treated with an anti-CD20 antibody.

### Example 16: Sialidase Treatment Disrupts Siglec-15 Activity on T Cells

[0356] Siglec-15 is an important immune suppressor. Siglec-15 is only expressed on certain myeloid cells under normal conditions, but it is broadly upregulated on human cancer cells and tumor-infiltrating myeloid cells. Siglec-15 acts as a ligand and suppresses antigen-specific T cell responses in vitro and in vivo. Genetic ablation or antibody blockade of Siglec-15 increases anti-tumor immunity in the tumor microenvironment (TME) and inhibits tumor growth in some mouse models.

[0357] This example demonstrates that neuraminidase treatment removes the Siglec-15 ligand, thereby disrupting Siglec-15 binding activity. It is believed that the disruption of Siglec-15 binding activity in vivo would cause increased anti-tumor immunity in the TME and inhibit tumor growth.

[0358] Human PBMCs were thawed and stimulated with anti-CD3 (OKT3 clone) and anti-CD28 (clone CD28.2) antibodies (both from eBiosciences, Thermo Fisher Scientific) at final concentration of 1 μg/mL in complete RPMI media (supplied with 10% heat inactivated FBS, non-essential amino acids and sodium pyruvate). On day 2, the floating cells were collected and re-plated in fresh complete RPMI media, anti-CD3 and anti-CD28 antibodies were replenished at 1 μg/mL to stimulate cells continuously. After 3 more days, cells were re-seeded in 15 mL conical tube at 10⁶/ml density and treated with different groups as follows: (1) no treatment; (2) a loss of function sialidase (“LOF FC,” as described in previous examples) at a 50 μg/mL final concentration; (3) M106 at a 50 μg/mL final concentration, and (4) BiNanH2—2 μg/mL final concentration. BiNanH2 is a strong sialidase from Bifidobacterium infantis that was used as a positive control.

[0359] Cells were supplied with anti-CD3 anti-CD28 antibodies and incubated in the 37° C. incubator overnight. The next day (˜14 hours later), cells were spun down, media was removed and then cells were blocked with Human TruStain FcX Fc receptor blocker (Biolegend®) along with LIVE/DEAD™ Fixable Near-IR Dead Cell Stain in PBS. The cells were then blocked with heat inactivated human serum (5% in PBS).

[0360] Cells were stained with Human Siglec-15-Fc (prepared by Palleon Pharmaceuticals; MW: ˜100 KDa) at final concentration of 1 μM/100 μg/mL. Cells were incubated on ice for 15 minutes and then washed with PBS.

[0361] Next, cells were stained with anti-human Fc-AF647 antibody in FACS staining buffer. Cells were incubated on ice for 5 minutes and then washed.

[0362] Then, cells were stained for CD4 and CD8 markers in FACS staining buffer as described in earlier examples. Cells were incubated on ice for 15 minutes and then washed. Cells were fixed and run on a flow cytometer (BD FACSCelesta™ (BD Biosciences)) and data was analyzed.

[0363] FIG. 29 depicts the results of Siglec-15-Fc staining of CD4+ cells (FIG. 29A) and CD8+ cells (FIG. 29B) following the various treatments. As a control, Isotype IgG1 staining is also shown. As shown, treatment of activated CD4 and CD8 cells with M106 FC or BiNaNH2 (positive control) decreased Siglec-15-Fc staining as compared to no treatment or treatment with LOF FC. FIG. 30 depicts the results of Siglec-15-Fc staining of CD4+ cells (FIG. 30A) and CD8+ cells (FIG. 30B) using PBMCs from a second healthy donor. These results demonstrate that Siglec-15 binding to activated T cells is sialic acid-dependent and removal of sialic acids by neuraminidase disrupts this interaction.

[0364] Accordingly, this example demonstrates that neuraminidase treatment with a sialidase of the invention removes the Siglec-15 ligand, thereby disrupting Siglec-15 binding activity. It is believed that the disruption of Siglec-15 binding activity in vivo would cause increased anti-tumor immunity in the TME and inhibit tumor growth.

### INCORPORATION BY REFERENCE

[0365] The entire disclosure of each of the patent and scientific documents referred to herein is incorporated by reference for all purposes.

### EQUIVALENTS

[0366] The invention may be embodied in other specific forms without departing from the spirit or essential characteristics thereof. The foregoing embodiments are therefore to be considered in all respects illustrative rather than limiting on the invention described herein. Scope of the invention is thus indicated by the appended claims rather than by the foregoing description, and all changes that come within the meaning and range of equivalency of the claims are intended to be embraced therein.

SEQUENCE LISTING

SEQ ID NO: 1:
MASLPVLQKESVFQSGAHAYRIPALLYLPGQQSLLAFAEQRASKKDEHAELIVLRRGDYDAP
THQVQWQAQEVVAQARLDGHRSMNPCPLYDAQTGTLFLFFIAIPGQVTEQQQLQTRANVTRL
CQVTSTDHGRTWSSPRDLTDAAIGPAYREWSTFAVGPGHCLQLHDRARSLVVPAYAYRKLHP
IQRPIPSAFCFLSHDHGRTWARGHFVAQDTLECQVAEVETGEQRVVTLNARSHLRARVQAQS
TNDGLDFQESQLVKKLVEPPPQGCQGSVISFPSPRSGPGSPAQWLLYTHPTHSWQRADLGAY
LNPRPPAPEAWSEPVLLAKGSCAYSDLQSMGTGPDGSPLFGCLYEANDYEEIVFLMFTLKQA
FPAEYLPQ
SEQ ID NO: 2:
MEDLRPMATCPVLQKETLFRTGVHAYRIPALLYLKKQKTLLAFAEKRASKTDEHAELIVLRR
GSYNEATNRVKWQPEEVVTQAQLEGHRSMNPCPLYDKQTKTLFLFFIAVPGRVSEHHQLHTK
VNVTRLCCVSSTDHGRTWSPIQDLTETTIGSTHQEWATFAVGPGHCLQLRNPAGSLLVPAYA
YRKLHPAQKPTPFAFCFISLDHGHTWKLGNFVAENSLECQVAEVGTGAQRMVYLNARSFLGA
RVQAQSPNDGLDFQDNRVVSKLVEPPHGCHGSVVAFHNPISKPHALDTWLLYTHPTDSRNRT
NLGVYLNQMPLDPTAWSEPTLLAMGICAYSDLQNMGQGPDGSPQFGCLYESGNYEEIIFLIF
TLKQAFPTVFDAQ
SEQ ID NO: 3:
EDLRP
SEQ ID NO: 4:
MEDLRP
SEQ ID NO: 5:
DKTHTCPPCPAPELLGGPSVFLFPPKPKDTLMISRTPEVTCVVVDVSHEDPEVKFNWYVDGV
EVHNAKTKPREEQYNSTYRVVSVLTVLHQDWLNGKEYKCKVSNKALPAPIEKTISKAKGQPR
EPQVYTLPPSREEMTKNQVSLTCLVKGFYPSDIAVEWESNGQPENNYKTTPPVLDSDGSFFL
YSKLTVDKSRWQQGNVFSCSVMHEALHNHYTQKSLSLSPGK
SEQ ID NO: 6:
ACAGTGGAAAAGTCCGTGGTGTTCAAGGCCGAGGGCGAGCACTTCACCGACCAGAAAGGCAA
TACCATCGTCGGCTCTGGCAGCGGCGGCACCACCAAGTACTTTAGAATCCCCGCCATGTGCA
CCACCAGCAAGGGCACCATTGTGGTGTTCGCCGACGCCAGACACAACACCGCCAGCGATCAG
AGCTTCATCGATACCGCTGCCGCCAGATCTACCGATGGCGGCAAGACCTGGAACAAGAAGAT
CGCCATCTACAACGACCGCGTGAACAGCAAGCTGAGCAGAGTGATGGACCCTACCTGCATCG
TGGCCAACATCCAGGGCAGAGAAACCATCCTGGTCATGGTCGGAAAGTGGAACAACAACGAT
AAGACCTGGGGCGCCTACAGAGACAAGGCCCCTGATACCGATTGGGACCTCGTGCTGTACAA
GAGCACCGATGACGGCGTGACCTTCAGCAAGGTGGAAACAAACATCCACGACATCGTGACCA
AGAACGGCACCATCTCTGCCATGCTCGGCGGCGTTGGATCTGGCCTGCAACTGAATGATGGC
AAGCTGGTGTTCCCCGTGCAGATGGTCCGAACAAAGAATATCACCACCGTGCTGAATACCAG
CTTCATCTACAGCACCGACGGCATCACATGGTCCCTGCCTAGCGGCTACTGTGAAGGCTTTG
GCAGCGAGAACAACATCATCGAGTTCAACGCCAGCCTGGTCAACAACATCCGGAACAGCGGC
CTGCGGAGAAGCTTCGAGACAAAGGACTTCGGAAAGACGTGGACCGAGTTTCCTCCAATGGA
CAAGAAGGTGGACAACCGGAACCACGGCGTGCAGGGCAGCACAATCACAATCCCTAGCGGCA
ACAAACTGGTGGCCGCTCACTCTAGCGCCCAGAACAAGAACAACGACTACACCAGAAGCGAC
ATCAGCCTGTACGCCCACAACCTGTACAGCGGCGAAGTGAAGCTGATCGACGACTTCTACCC
CAAAGTGGGCAATGCCAGCGGAGCCGGCTACAGCTGTCTGAGCTACCGGAAAAATGTGGACA
AAGAAACCCTGTACGTGGTGTACGAGGCCAACGGCAGCATCGAGTTTCAGGACCTGAGCAGA
CATCTGCCCGTGATCAAGAGCTACAAC
SEQ ID NO: 7:
ENDFGLVQPLVTMEQLLWVSGRQIGSVDTFRIPLITATPRGTLLAFAEARKMSSSDEGAKFI
ALRRSMDQGSTWSPTAFIVNDGDVPDGLNLGAVVSDVETGVVFLFYSLCAHKAGCQVASTML
VWSKDDGVSWSTPRNLSLDIGTEVFAPGPGSGIQKQREPRKGRLIVCGHGTLERDGVFCLLS
DDHGASWRYGSGVSGIPYGQPKQENDFNPDECQPYELPDGSVVINARNQNNYHCHCRIVLRS
YDACDTLRPRDVTFDPELVDPVVAAGAVVTSSGIVFFSNPAHPEFRVNLTLRWSFSNGTSWR
KETVQLWPGPSGYSSLATLEGSMDGEEQAPQLYVLYEKGRNHYTESISVAKISV
SEQ ID NO: 8:
MEEVTTCSFNSPLFRQEDDRGITYRIPALLYIPPTHTFLAFAEKRSTRRDEDALHLVLRRGL
RIGQLVQWGPLKPLMEATLPGHRTMNPCPVWEQKSGCVFLFFICVRGHVTERQQIVSGRNAA
RLCFIYSQDAGCSWSEVRDLTEEVIGSELKHWATFAVGPGHGIQLQSGRLVIPAYTYYIPSW
FFCFQLPCKTRPHSLMIYSDDLGVTWHHGRLIRPMVTVECEVAEVTGRAGHPVLYCSARTPN
RCRAEALSTDHGEGFQRLALSRQLCEPPHGCQGSVVSFRPLEIPHRCQDSSSKDAPTIQQSS
PGSSLRLEEEAGTPSESWLLYSHPTSRKQRVDLGIYLNQTPLEAACWSRPWILHCGPCGYSD
LAALEEEGLFGCLFECGTKQECEQIAFRLFTHREILSHLQGDCTSPGRNPSQFKSN
SEQ ID NO: 9:
MRPADLPPRPMEESPASSSAPTETEEPGSSAEVMEEVTTCSFNSPLFRQEDDRGITYRIPAL
LYIPPTHTFLAFAEKRSTRRDEDALHLVLRRGLRIGQLVQWGPLKPLMEATLPGHRTMNPCP
VWEQKSGCVFLFFICVRGHVTERQQIVSGRNAARLCFIYSQDAGCSWSEVRDLTEEVIGSEL
KHWATFAVGPGHGIQLQSGRLVIPAYTYYIPSWFFCFQLPCKTRPHSLMIYSDDLGVTWHHG
RLIRPMVTVECEVAEVTGRAGHPVLYCSARTPNRCRAEALSTDHGEGFQRLALSRQLCEPPH
GCQGSVVSFRPLEIPHRCQDSSSKDAPTIQQSSPGSSLRLEEEAGTPSESWLLYSHPTSRKQ
RVDLGIYLNQTPLEAACWSRPWILHCGPCGYSDLAALEEEGLFGCLFECGTKQECEQIAFRL
FTHREILSHLQGDCTSPGRNPSQFKSN
SEQ ID NO: 10:
MGVPRTPSRTVLFERERTGLTYRVPSLLPVPPGPTLLAFVEQRLSPDDSHAHRLVLRRGTLA
GGSVRWGALHVLGTAALAEHRSMNPCPVHDAGTGTVFLFFIAVLGHTPEAVQIATGRNAARL
CCVASRDAGLSWGSARDLTEEAIGGAVQDWATFAVGPGHGVQLPSGRLLVPAYTYRVDRREC
FGKICRTSPHSFAFYSDDHGRTWRCGGLVPNLRSGECQLAAVDGGQAGSFLYCNARSPLGSR
VQALSTDEGTSFLPAERVASLPETAWGCQGSIVGFPAPAPNRPRDDSWSVGPGSPLQPPLLG
PGVHEPPEEAAVDPRGGQVPGGPFSRLQPRGDGPRQPGPRPGVSGDVGSWTLALPMPFAAPP
QSPTWLLYSHPVGRRARLHMGIRLSQSPLDPRSWTEPWVIYEGPSGYSDLASIGPAPEGGLV
FACLYESGARTSYDEISFCTFSLREVLENVPASPKPPNLGDKPRGCCWPS
SEQ ID NO: 11:
MMSSAAFPRWLSMGVPRTPSRTVLFERERTGLTYRVPSLLPVPPGPTLLAFVEORLSPDDSH
AHRLVLRRGTLAGGSVRWGALHVLGTAALAEHRSMNPCPVHDAGTGTVFLFFIAVLGHTPEA
VQIATGRNAARLCCVASRDAGLSWGSARDLTEEAIGGAVQDWATFAVGPGHGVQLPSGRLLV
PAYTYRVDRRECFGKICRTSPHSFAFYSDDHGRTWRCGGLVPNLRSGECQLAAVDGGQAGSF
LYCNARSPLGSRVQALSTDEGTSFLPAERVASLPETAWGCQGSIVGFPAPAPNRPRDDSWSV
GPGSPLQPPLLGPGVHEPPEEAAVDPRGGQVPGGPFSRLQPRGDGPRQPGPRPGVSGDVGSW
TLALPMPFAAPPQSPTWLLYSHPVGRRARLHMGIRLSQSPLDPRSWTEPWVIYEGPSGYSDL
ASIGPAPEGGLVFACLYESGARTSYDEISFCTFSLREVLENVPASPKPPNLGDKPRGCCWPS
SEQ ID NO: 12:
MASLP
SEQ ID NO: 13:
ASLP
SEQ ID NO: 14:
TVEKSWF
SEQ ID NO: 15:
GDYDAPTHQVQW
SEQ ID NO: 16:
SMDQGSTW
SEQ ID NO: 17:
STDGGKTW
SEQ ID NO: 18:
PRPPAPEA
SEQ ID NO: 19:
QTPLEAAC
SEQ ID NO: 20:
NPRPPAPEA
SEQ ID NO: 21:
SQNDGES
SEQ ID NO: 22:
LSHSLST
SEQ ID NO: 23:
GAGAACGACTTTGGACTGGTGCAGCCTCTGGTCACCATGGAACAGCTGCTGTGGGTTTCCGG
CAGACAGATCGGCAGCGTGGACACCTTCAGAATCCCTCTGATCACCGCCACACCTAGAGGCA
CCCTGCTGGCCTTTGCCGAGGCCAGAAAGATGAGCAGCTCTGACGAGGGCGCCAAGTTTATT
GCCCTGAGGCGGTCTATGGACCAGGGCTCTACATGGTCCCCTACCGCCTTCATCGTGAACGA
TGGCGACGTGCCCGATGGCCTGAATCTGGGAGCTGTGGTGTCCGATGTGGAAACCGGCGTGG
TGTTCCTGTTCTACAGCCTGTGTGCCCACAAGGCCGGTTGTCAGGTGGCCAGCACAATGCTC
GTGTGGTCCAAGGACGACGGCGTGTCCTGGTCTACCCCTAGAAACCTGAGCCTGGACATCGG
CACCGAAGTGTTTGCTCCAGGACCTGGCTCTGGCATCCAGAAGCAGAGAGAGCCCAGAAAGG
GCAGACTGATCGTGTGTGGCCACGGCACCCTTGAGAGAGATGGCGTTTTCTGCCTGCTGAGC
GACGATCATGGCGCCTCTTGGAGATACGGCAGCGGAGTGTCTGGAATCCCTTACGGCCAGCC
TAAGCAAGAGAACGATTTCAACCCCGACGAGTGCCAGCCTTACGAGCTGCCTGATGGCAGCG
TCGTGATCAACGCCCGGAACCAGAACAACTACCACTGCCACTGCCGGATCGTGCTGAGAAGC
TACGACGCCTGCGATACCCTGCGGCCTAGAGATGTGACCTTCGATCCTGAGCTGGTGGACCC
TGTTGTTGCCGCTGGTGCCGTCGTGACATCTAGCGGCATCGTGTTCTTCAGCAACCCTGCTC
ACCCCGAGTTCAGAGTGAATCTGACCCTGCGGTGGTCCTTCAGCAATGGCACAAGCTGGCGG
AAAGAAACCGTGCAGCTTTGGCCTGGACCTAGCGGCTACTCTTCTCTGGCTACACTGGAAGG
CAGCATGGACGGCGAAGAACAGGCCCCTCAGCTGTACGTGCTGTACGAGAAGGGCAGAAACC
ACTAGACCGAGAGCATCAGCGTGGCCAAGATCAGCGTT
SEQ ID NO: 24:
ATGGCCAGCCTGCCTGTGCTGCAGAAAGAAAGCGTGTTCCAGTCTGGCGCCCACGCCTACAG
AATTCCCGCTCTGCTGTATCTGCCAGGCCAGCAGTCTCTGCTGGCTTTCGCTGAACAGCGGG
CCAGCAAGAAGGATGAGCACGCCGAACTGATCGTGCTGCGGAGAGGCGATTACGACGCCCCT
ACACATCAGGTGCAGTGGCAGGCTCAAGAGGTGGTGGCTCAGGCTAGACTGGACGGCCACAG
ATCTATGAACCCCTGTCCTCTGTACGATGCCCAGACCGGCACACTGTTTCTGTTCTTTATCG
CTATCCCCGGCCAAGTGACCGAGCAGCAGCAGCTGCAGACAAGAGCCAACGTGACCAGACTG
TGTCAAGTGACCTCCACCGACCACGGCAGAACCTGGTCTAGCCCTAGAGATCTGACCGACGC
CGCCATCGGACCTGCCTATAGAGAGTGGTCCACCTTCGCCGTTGGACCTGGACACTGTCTCC
AGCTGCACGACAGGGCTAGATCTCTGGTGGTGCCTGCCTACGCCTATAGAAAGCTGCACCCC
ATCCAGCGGCCTATTCCTAGCGCCTTCTGCTTTCTGAGCCACGATCACGGCAGGACATGGGC
CAGAGGACATTTCGTGGCCCAGGACACACTGGAATGCCAGGTGGCCGAAGTGGAAACCGGCG
AGCAGAGAGTCGTGACCCTGAACGCCAGATCTCACCTGAGAGCCAGAGTGCAGGCCCAGAGC
ACAAACGACGGCCTGGATTTCCAAGAGAGCCAGCTGGTCAAGAAACTGGTGGAACCTCCTCC
ACAGGGCTGTCAGGGAAGCGTGATCAGCTTTCCATCTCCTAGAAGCGGCCCTGGCTCTCCTG
CTCAGTGGCTGCTGTATACACACCCCACACACAGCTGGCAGAGAGCCGATCTGGGCGCCTAC
CTGAATCCTAGACCTCCTGCTCCTGAGGCTTGGAGCGAACCTGTTCTGCTGGCCAAGGGCAG
CTGTGCCTACAGCGATCTGCAGTCTATGGGCACAGGCCCTGATGGCAGCCCTCTGTTTGGCT
GTCTGTACGAGGCCAACGACTACGAAGAGATCGTGTTCCTGATGTTCACCCTGAAGCAGGCC
TTTCCAGCCGAGTACCTGCCTCAA
SEQ ID NO: 25:
ATGGAGGAAGTGACCACCTGTAGCTTCAACAGCCCTCTGTTCCGGCAAGAGGACGACCGGGG
CATCACCTACAGAATCCCTGCTCTGCTGTACATCCCTCCTACACACACCTTTCTGGCCTTCG
CCGAGAAGCGGAGCACCAGACGAGATGAAGATGCCCTGCACCTGGTGCTGAGAAGAGGCCTG
AGAATCGGACAGCTGGTGCAGTGGGGACCTCTGAAGCCTCTGATGGAAGCCACACTGCCCGG
CCACAGAACCATGAATCCTTGTCCTGTGTGGGAGCAGAAAAGCGGCTGCGTGTTCCTGTTCT
TCATCTGCGTGCGGGGCCACGTGACCGAGAGACAGCAAATCGTGTCCGGCAGAAACGCCGCC
AGACTGTGCTTCATCTACAGCCAGGATGCCGGCTGCTCTTGGAGCGAAGTTCGGGATCTGAC
CGAAGAAGTGATCGGCAGCGAGCTGAAGCACTGGGCCACATTTGCTGTTGGCCCTGGCCACG
GAATCCAGCTGCAATCTGGCAGACTGGTCATCCCCGCCTACACCTACTATATCCCCAGCTGG
TTCTTCTGCTTCCAACTGCCTTGCAAGACCCGGCCTCACAGCCTGATGATCTACAGCGACGA
TCTGGGCGTGACATGGCACCACGGCAGACTGATCAGACCCATGGTCACCGTGGAATGCGAGG
TGGCCGAAGTGACAGGCAGAGCTGGACACCCTGTGCTGTACTGCTCTGCCAGAACACCCAAC
CGGTGTAGAGCCGAGGCTCTGTCTACAGATCACGGCGAGGGCTTTCAGAGACTGGCCCTCTC
TAGACAGCTGTGCGAACCTCCTCATGGCTGTCAGGGCAGCGTGGTGTCCTTCAGACCTCTGG
AAATCCCTCACCGGTGCCAGGACAGCAGCTCTAAGGATGCCCCTACCATCCAGCAGTCTAGC
CCTGGCAGCAGCCTGAGACTGGAAGAGGAAGCCGGAACACCTAGCGAGAGCTGGCTGCTGTA
CTCTCACCCCACCAGCAGAAAGCAGAGAGTGGACCTGGGCATCTACCTGAATCAGACCCCTC
TGGAAGCCGCCTGTTGGAGCAGACCTTGGATTCTGCACTGTGGCCCTTGCGGCTACTCTGAT
CTGGCCGCTCTGGAAGAAGAGGGCCTGTTCGGCTGCCTGTTTGAGTGCGGCACAAAGCAAGA
GTGCGAGCAGATCGCCTTCCGGCTGTTCACCCACAGAGAGATCCTGAGCCATCTGCAGGGCG
ACTGCACAAGCCCAGGCAGAAATCCCAGCCAGTTCAAGAGCAAC
SEQ ID NO: 26:
ATGGGCGTGCCCAGAACACCCAGCAGAACCGTGCTGTTCGAGAGAGAGAGGACCGGCCTGAC
CTACAGAGTGCCTTCTCTGCTGCCTGTGCCTCCTGGACCTACACTGCTGGCCTTCGTGGAAC
AGAGACTGAGCCCCGATGATTCTCACGCCCACAGACTGGTGCTGAGAAGAGGAACACTGGCT
GGCGGCTCTGTTAGATGGGGAGCACTGCATGTGCTGGGCACAGCTGCTCTTGCCGAGCACAG
ATCCATGAATCCCTGTCCTGTGCACGACGCCGGAACCGGCACAGTGTTTCTGTTCTTTATCG
CCGTGCTGGGCCACACACCTGAGGCCGTTCAAATTGCCACCGGCAGAAATGCCGCCAGACTG
TGTTGTGTGGCCTCCAGAGATGCCGGCCTGTCTTGGGGATCTGCCAGAGATCTGACCGAGGA
AGCCATTGGCGGAGCCGTTCAGGATTGGGCCACATTTGCTGTTGGACCTGGACACGGCGTGC
AGCTGCCAAGTGGTAGACTGCTGGTGCCTGCCTACACATACAGAGTGGATCGGAGAGAGTGC
TTCGGAAAGATCTGCCGGACAAGCCCTCACAGCTTCGCCTTCTACTCCGACGATCACGGCCG
GACTTGGAGATGTGGTGGCCTGGTGCCTAATCTGAGAAGCGGCGAATGTCAACTGGCCGCCG
TTGATGGTGGACAGGCTGGCAGCTTCCTGTACTGCAACGCCAGATCTCCTCTGGGCTCTAGA
GTGCAGGCCCTGTCTACCGATGAGGGCACCAGTTTTCTGCCCGCCGAAAGAGTTGCCTCTCT
GCCTGAAACAGCCTGGGGCTGTCAGGGCTCTATCGTGGGATTTCCTGCTCCTGCTCCAAACA
GACCCCGGGACGATTCTTGGAGTGTCGGCCCTGGATCTCCACTGCAGCCTCCATTGCTTGGA
CCAGGCGTTCACGAGCCACCTGAAGAGGCTGCCGTTGATCCTAGAGGCGGACAAGTTCCTGG
CGGCCCTTTTAGCAGACTGCAGCCAAGAGGCGACGGCCCTAGACAACCTGGACCAAGACCTG
GCGTCAGCGGAGATGTTGGCTCTTGGACACTGGCCCTGCCTATGCCTTTTGCCGCTCCTCCT
CAGTCTCCTACCTGGCTGCTGTACTCTCACCCTGTTGGCAGACGGGCCAGACTGCACATGGG
CATCAGACTGTCTCAGAGCCCTCTGGACCCCAGAAGCTGGACAGAGCCTTGGGTCATCTATG
AGGGCCCTAGCGGCTACAGCGATCTGGCCTCTATTGGCCCAGCTCCTGAAGGCGGACTGGTG
TTCGCTTGTCTGTATGAGAGCGGCGCCAGAACCAGCTACGACGAGATCAGCTTCTGCACCTT
CAGCCTGCGCGAGGTGCTGGAAAATGTGCCCGCCTCTCCTAAGCCTCCTAACCTGGGCGATA
AGCCTAGAGGCTGTTGCTGGCCATCT
SEQ ID NO: 27:
MTGERPSTALPDRRWGPRILGFWGGCRVWVFAAIFLLLSLAASWSKA
SEQ ID NO: 28:
MDMRVPAQLLGLLLLWLPGARC
SEQ ID NO: 29:
YGTL
SEQ ID NO: 30:
MTVEKSVVFKAEGEHFTDQKGNTIVGSGSGGTTKYFRIPAMCTTSKGTIVVFADARHNTASD
QSFIDTAAARSTDGGKTWNKKIAIYNDRVNSKLSRVMDPTCIVANIQGRETILVMVGKWNNN
DKTWGAYRDKAPDTDWDLVLYKSTDDGVTFSKVETNIHDIVTKNGTISAMLGGVGSGLQLND
GKLVFPVQMVRTKNITTVLNTSFIYSTDGITWSLPSGYCEGFGSENNIIEFNASLVNNIRNS
GLRRSFETKDFGKTWTEFPPMDKKVDNRNHGVQGSTITIPSGNKLVAAHSSAQNKNNDYTRS
DISLYAHNLYSGEVKLIDDFYPKVGNASGAGYSCLSYRKNVDKETLYVVYEANGSIEFQDLS
RHLPVIKSYN
SEQ ID NO: 31:
EPKSCDKTHTCPPCPAPELLGGPSVFLFPPKPKDTLMISRTPEVTCVVVDVSHEDPEVKFNW
YVDGVEVHNAKTKPREEQYNSTYRVVSVLTVLHQDWLNGKEYKCKVSNKALPAPIEKTISKA
KGQPREPQVYTLPPSREEMTKNQVSLTCLVKGFYPSDIAVEWESNGQPENNYKTTPPVLDSD
GSFFLYSKLTVDKSRWQQGNVFSCSVMHEALHNHYTQKSLSLSPGK
SEQ ID NO: 32:
DKTHTCPPCPAPELLGGPSVFLFPPKPKDTLMISRTPEVTCVVVDVSHEDPEVKFNWYVDGV
EVHNAKTKPREEQYNSTYRVVSVLTVLHQDWLNGKEYKCKVSNKALPAPIEKTISKAKGQPR
EPQVYTLPPSREEMTKNQVSLTCLVKGFYPSDIAVEWESNGQPENNYKTTPPVLDSDGSFFL
TSKLTVDKSRWQQGNVFSCSVMHEALHNHYTQKSLSLSPGK
SEQ ID NO: 33:
EPKSCDKTHTCPPCPAPELLGGPSVFLFPPKPKDTLMISRTPEVTCVVVDVSHEDPEVKFNW
YVDGVEVHNAKTKPREEQYNSTYRVVSVLTVLHQDWLNGKEYKCKVSNKALPAPIEKTISKA
KGQPREPQVYTLPPSREEMTKNQVSLYCLVKGFYPSDIAVEWESNGQPENNYKTTPPVLDSD
GSFFLYSKLTVDKSRWQQGNVFSCSVMHEALHNHYTQKSLSLSPGK
SEQ ID NO: 34:
ATGAGACCTGCGGACCTGCCCCCGCGCCCCATGGAAGAATCCCCGGCGTCCAGCTCTGCCCC
GACAGAGACGGAGGAGCCGGGGTCCAGTGCAGAGGTCATGGAAGAAGTGACAACATGCTCCT
TCAACAGCCCTCTGTTCCGGCAGGAAGATGACAGAGGGATTACCTACCGGATCCCAGCCCTG
CTCTACATACCCCCCACCCACACCTTCCTGGCCTTTGCAGAGAAGCGTTCTACGAGGAGAGA
TGAGGATGCTCTCCACCTGGTGCTGAGGCGAGGGTTGAGGATTGGGCAGTTGGTACAGTGGG
GGCCCCTGAAGCCACTGATGGAAGCCACACTACCGGGGCATCGGACCATGAACCCCTGTCCT
GTATGGGAGCAGAAGAGTGGTTGTGTGTTCCTGTTCTTCATCTGTGTGCGGGGCCATGTCAC
AGAGCGTCAACAGATTGTGTCAGGCAGGAATGCTGCCCGCCTTTGCTTCATCTACAGTCAGG
ATGCTGGATGTTCATGGAGTGAGGTGAGGGACTTGACTGAGGAGGTCATTGGCTCAGAGCTG
AAGCACTGGGCCACATTTGCTGTGGGCCCAGGTCATGGCATCCAGCTGCAGTCAGGGAGACT
GGTCATCCCTGCGTATACCTACTACATCCCTTCCTGGTTCTTTTGCTTCCAGCTACCATGTA
AAACCAGGCCTCATTCTCTGATGATCTACAGTGATGACCTAGGGGTCACATGGCACCATGGT
AGACTCATTAGGCCCATGGTTACAGTAGAATGTGAAGTGGCAGAGGTGACTGGGAGGGCTGG
CCACCCTGTGCTATATTGCAGTGCCCGGACACCAAACAGGTGCCGGGCAGAGGCGCTCAGCA
CTGACCATGGTGAAGGCTTTCAGAGACTGGCCCTGAGTCGACAGCTCTGTGAGCCCCCACAT
GGTTGCCAAGGGAGTGTGGTAAGTTTCCGGCCCCTGGAGATCCCACATAGGTGCCAGGACTC
TAGCAGCAAAGATGCACCCACCATTCAGCAGAGCTCTCCAGGCAGTTCACTGAGGCTGGAGG
AGGAAGCTGGAACACCGTCAGAATCATGGCTCTTGTACTCACACCCAACCAGTAGGAAACAG
AGGGTTGACCTAGGTATCTATCTCAACCAGACCCCCTTGGAGGCTGCCTGCTGGTCCCGCCC
CTGGATCTTGCACTGTGGGCCCTGTGGCTACTCTGATCTGGCTGCTCTGGAGGAGGAGGGCT
TGTTTGGGTGTTTGTTTGAATGTGGGACCAAGCAAGAGTGTGAGCAGATTGCCTTCCGCCTG
TTTACACACCGGGAGATCCTGAGTCACCTGCAGGGGGACTGCACCAGCCCTGGTAGGAACCC
AAGCCAATTCAAAAGCAAT
SEQ ID NO: 35:
ATGATGAGCTCTGCAGCCTTCCCAAGGTGGCTGAGCATGGGGGTCCCTCGTACCCCTTCACG
GACAGTGCTCTTCGAGCGGGAGAGGACGGGCCTGACCTACCGCGTGCCCTCGCTGCTCCCCG
TGCCCCCCGGGCCCACCCTGCTGGCCTTTGTGGAGCAGCGGCTCAGCCCTGACGACTCCCAC
GCCCACCGCCTGGTGCTGAGGAGGGGCACGCTGGCCGGGGGCTCCGTGCGGTGGGGTGCCCT
GCACGTGCTGGGGACAGCAGCCCTGGCGGAGCACCGGTCCATGAACCCCTGCCCTGTGCACG
ATGCTGGCACGGGCACCGTCTTCCTCTTCTTCATCGCGGTGCTGGGCCACACGCCTGAGGCC
GTGCAGATCGCCACGGGAAGGAACGCCGCGCGCCTCTGCTGTGTGGCCAGCCGTGACGCCGG
CCTCTCGTGGGGCAGCGCCCGGGACCTCACCGAGGAGGCCATCGGTGGTGCCGTGCAGGACT
GGGCCACATTCGCTGTGGGTCCCGGCCACGGTGTGCAGCTGCCCTCAGGCCGCCTGCTGGTA
CCCGCCTACACCTACCGCGTGGACCGCCGAGAGTGTTTTGGCAAGATCTGCCGGACCAGCCC
TCACTCCTTCGCCTTCTACAGCGATGACCACGGCCGCACCTGGCGCTGTGGAGGCCTCGTGC
CCAACCTGCGCTCAGGCGAGTGCCAGCTGGCAGCGGTGGACGGTGGGCAGGCCGGCAGCTTC
CTCTACTGCAATGCCCGGAGCCCACTGGGCAGCCGTGTGCAGGCGCTCAGCACTGACGAGGG
CACCTCCTTCCTGCCCGCAGAGCGCGTGGCTTCCCTGCCCGAGACTGCCTGGGGCTGCCAGG
GCAGCATCGTGGGCTTCCCAGCCCCCGCCCCCAACAGGCCACGGGATGACAGTTGGTCAGTG
GGCCCCGGGAGTCCCCTCCAGCCTCCACTCCTCGGTCCTGGAGTCCACGAACCCCCAGAGGA
GGCTGCTGTAGACCCCCGTGGAGGCCAGGTGCCTGGTGGGCCCTTCAGCCGTCTGCAGCCTC
GGGGGGATGGCCCCAGGCAGCCTGGCCCCAGGCCTGGGGTCAGTGGGGATGTGGGGTCCTGG
ACCCTGGCACTCCCCATGCCCTTTGCTGCCCCGCCCCAGAGCCCCACGTGGCTGCTGTACTC
CCACCCAGTGGGGCGCAGGGCTCGGCTACACATGGGTATCCGCCTGAGCCAGTCCCCGCTGG
ACCCGCGCAGCTGGACAGAGCCCTGGGTGATCTACGAGGGCCCCAGCGGCTACTCCGACCTG
GCGTCCATCGGGCCGGCCCCTGAGGGGGGCCTGGTTTTTGCCTGCCTGTACGAGAGCGGGGC
CAGGACCTCCTATGATGAGATTTCCTTTTGTACATTCTCCCTGCGTGAGGTCCTGGAGAACG
TGCCCGCCAGCCCCAAACCGCCCAACCTTGGGGACAAGCCTCGGGGGTGCTGCTGGCCCTCC
SEQ ID NO: 36:
MRFKNVKKTALMLAMFGMATSSNAALFDYNATGDTEFDSPAKQGWMQDNTNNGSGVLTNADG
MPAWLVQGIGGRAQWTYSLSTNQHAQASSFGWRMTTEMKVLSGGMITNYYANGTQRVLPIIS
LDSSGNLVVEFEGQTGRTVLATGTAATEYHKFELVELPGSNPSASFYFDGKLIRDNIQPTAS
KQNMIVWGNGSSNTDGVAAYRDIKFEIQGDVIFRGPDRIPSIVASSVTPGVVTAFAEKRVGG
GDPGALSNTNDIITRTSRDGGITWDTELNLTEQINVSDEFDFSDPRPIYDPSSNTVLVSYAR
WPTDAAQNGDRIKPWMPNGIFYSVYDVASGNWQAPIDVTDQVKERSFQIAGWGGSELYRRNT
SLNSQQDWQSNAKIRIVDGAANQIQVADGSRKYVVTLSIDESGGLVANLNGVSAPIILQSEH
AKVHSFHDYELQYSALNHTTTLFVDGQQITTWAGEVSQENNIQFGNADAQIDGRLHVQKIVL
TQQGHNLVEFDAFYLAQQTPEVEKDLEKLGWTKIKTGNTMSLYGNASVNPGPGHGITLTRQQ
NISGSQNGRLIYPAIVLDRFFLNVMSIYSDDGGSNWQTGSTLPIPFRWKSSSILETLEPSEA
DMVELQNGDLLLTARLDFNQIVNGVNYSPRQQFLSKDGGITWSLLEANNANVFSNISTGTVD
ASITRFEQSDGSHFLLFTNPQGNPAGTNGRQNLGLWFSFDEGVTWKGPIQLVNGASAYSDIY
QLDSENAIVIVETDNSNMRILRMPITLLKQKLTLSQN
SEQ ID NO: 37:
TTGTCAATCAAGATGAGTTCACAACGAAGAAGAGCATCGATTCACAAGGAAACAGATTCTAA
TATAAAGGGAGTAGATATGCGTTTCAAAAACGTAAAGAAAACCGCTTTAATGCTTGCAATGT
TCGGTATGGCGACAAGCTCAAACGCCGCACTTTTTGACTATAACGCAACGGGTGACACTGAG
TTTGACAGTCCAGCCAAACAGGGATGGATGCAAGACAACACGAATAATGGCAGCGGCGTTTT
AACCAATGCAGATGGAATGCCCGCTTGGTTGGTGCAAGGTATTGGAGGGAGAGCTCAATGGA
CATATTCTCTCTCTACTAATCAACATGCCCAAGCATCAAGTTTCGGTTGGCGAATGACGACA
GAAATGAAAGTGCTCAGTGGTGGAATGATCACAAACTACTACGCCAACGGCACTCAGCGTGT
CTTACCCATCATTTCATTAGATAGCAGTGGTAACTTAGTTGTTGAGTTTGAAGGGCAAACTG
GACGCACCGTTTTGGCAACCGGCACAGCAGCAACGGAATATCATAAATTTGAATTGGTATTC
CTTCCTGGAAGTAACCCATCCGCTAGCTTTTACTTCGATGGCAAACTCATTCGTGACAACAT
CCAGCCGACTGCATCAAAACAAAATATGATCGTATGGGGGAATGGCTCATCAAATACGGATG
GTGTCGCCGCTTATCGTGATATTAAGTTTGAAATTCAAGGCGACGTCATCTTCAGAGGCCCA
GACCGTATACCGTCCATTGTAGCAAGTAGCGTAACACCAGGGGTGGTAACCGCATTTGCAGA
GAAACGTGTGGGGGGAGGAGATCCCGGTGCTCTGAGTAATACCAATGACATAATCACTCGTA
CCTCACGAGATGGCGGTATAACTTGGGATACCGAGCTCAACCTCACTGAGCAAATCAATGTC
AGTGATGAGTTTGATTTCTCCGATCCTCGGCCTATCTATGATCCTTCCTCCAATACGGTTCT
TGTCTCTTATGCTCGATGGCCGACCGATGCCGCTCAAAACGGAGATCGAATAAAACCATGGA
TGCCAAACGGTATTTTTTACAGCGTCTATGATGTTGCATCAGGGAACTGGCAAGCGCCTATC
GATGTTACCGATCAGGTGAAAGAACGCAGTTTCCAAATCGCTGGTTGGGGTGGTTCAGAGCT
GTATCGCCGAAATACCAGCCTAAATAGCCAGCAAGACTGGCAATCAAACGCTAAGATCCGAA
TTGTTGATGGTGCAGCGAACCAGATACAAGTTGCCGATGGTAGCCGAAAATATGTTGTCACA
CTGAGTATTGATGAATCAGGTGGTCTAGTCGCTAATCTAAACGGTGTTAGTGCTCCGATTAT
CCTGCAATCTGAACACGCAAAGGTACACTCTTTCCATGACTACGAACTTCAATATTCGGCGT
TAAACCACACCACAACGTTATTCGTGGATGGTCAGCAAATCACAACTTGGGCTGGCGAAGTA
TCGCAGGAGAACAACATTCAGTTTGGTAATGCGGATGCCCAAATTGACGGCAGACTGCATGT
GCAAAAAATTGTTCTCACACAGCAAGGCCATAACCTCGTGGAGTTTGATGCTTTCTATTTAG
CACAGCAAACCCCTGAAGTAGAGAAAGACCTTGAAAAGCTTGGTTGGACAAAAATTAAAACG
GGCAACACCATGAGTTTGTATGGAAATGCCAGTGTCAACCCAGGACCGGGTCATGGCATCAC
CCTTACTCGACAACAAAATATCAGTGGCAGCCAAAACGGCCGCTTGATCTACCCAGCGATTG
TGCTTGATCGTTTCTTCTTGAACGTCATGTCTATTTACAGTGATGATGGCGGTTCAAACTGG
CAAACCGGTTCAACACTCCCTATCCCCTTTCGCTGGAAGAGTTCGAGTATCCTAGAAACTCT
CGAACCTAGTGAAGCTGATATGGTTGAACTCCAAAACGGTGATCTACTCCTTACTGCACGCC
TTGATTTTAACCAAATCGTTAATGGTGTGAACTATAGCCCACGCCAGCAATTTTTGAGTAAA
GATGGTGGAATCACGTGGAGCCTACTTGAGGCTAACAACGCTAACGTCTTTAGCAATATCAG
TACTGGTACCGTTGATGCTTCTATTACTCGGTTCGAGCAAAGTGACGGTAGCCATTTCTTAC
TCTTTACTAACCCACAAGGAAACCCTGCGGGGACAAATGGCAGGCAAAATCTAGGCTTATGG
TTTAGCTTCGATGAAGGGGTGACATGGAAAGGACCAATTCAACTTGTTAATGGTGCATCGGC
ATATTCTGATATTTATCAATTGGATTCGGAAAATGCGATTGTCATTGTTGAAACGGATAATT
CAAATATGCGAATTCTTCGTATGCCTATCACATTGCTAAAACAGAAGCTGACCTTATCGCAA
AACTAA
SEQ ID NO: 38:
MVGADPTRPRGPLSYWAGRRGQGLAAIFLLLVSAAESEARAEDDFSLVQPLVTMEQLLWVSG
KQIGSVDTFRIPLITATPRGTLLAFAEARKKSASDEGAKFIAMRRSTDQGSTWSSTAFIVDD
GEASDGLNLGAVVNDVDTGIVFLIYTLCAHKVNCQVASTMLVWSKDDGISWSPPRNLSVDIG
TEMFAPGPGSGIQKQREPGKGRLIVCGHGTLERDGVFCLLSDDHGASWHYGTGVSGIPFGQP
KHDHDFNPDECQPYELPDGSVIINARNQNNYHCRCRIVLRSYDACDTLRPRDVTFDPELVDP
VVAAGALATSSGIVFFSNPAHPEFRVNLTLRWSFSNGTSWLKERVQVWPGPSGYSSLTALEN
STDGKKQPPQLFVLYEKGLNRYTESISMVKISVYGTL
SEQ ID NO: 39:
MTVQPSPWFSDLRPMATCPVLQKETLFRTGVHAYRIPALLYLKKQKTLLAFAEKRASKTDEH
AELIVLRRGSYNEATNRVKWQPEEVVTQAQLEGHRSMNPCPLYDKQTKTLFLFFIAVPGRVS
EHHQLHTKVNVTRLCCVSSTDHGRTWSPIQDLTETTIGSTHQEWATFAVGPGHCLQLRNPAG
SLLVPAYAYRKLHPAQKPTPFAFCFISLDHGHTWKLGNFVAENSLECQVAEVGTGAQRMVYL
NARSFLGARVQAQSPNDGLDFQDNRVVSKLVEPPHGCHGSVVAFHNPISKPHALDTWLLYTH
PTDSRNRTNLGVYLNQMPLDPTAWSEPTLLAMGICAYSDLQNMGQGPDGSPQFGCLYESGNY
EEIIELIFTLKQAFPTVFDAQ
SEQ ID NO: 40:
MEEVPPYSLSSTLFQQEEQSGVTYRIPALLYLPPTHTFLAFAEKRTSVRDEDAACLVLRRGL
MKGRSVQWGPQRLLMEATLPGHRTMNPCPVWEKNTGRVYLFFICVRGHVTERCQIVWGKNAA
RLCFLCSEDAGCSWGEVKDLTEEVIGSEVKRWATFAVGPGHGIQLHSGRLIIPAYAYYVSRW
FLCFACSVKPHSLMIYSDDFGVTWHHGKFIEPQVTGECQVAEVAGTAGNPVLYCSARTPSRF
RAEAFSTDSGGCFQKPTLNPQLHEPRTGCQGSVVSFRPLKMPNTYQDSIGKGAPATQKCPLL
DSPLEVEKGAETPSATWLLYSHPTSKRKRINLGIYYNRNPLEVNCWSRPWILNRGPSGYSDL
AVVEEQDLVACLFECGEKNEYERIDFCLFSDHEVLSCEDCTSPSSD
SEQ ID NO: 41:
METAGAPFCFHVDSLVPCSYWKVMGPTRVPRRTVLFQRERTGLTYRVPALLCVPPRPTLLAF
AEQRLSPDDSHAHRLVLRRGTLTRGSVRWGTLSVLETAVLEEHRSMNPCPVLDEHSGTIFLF
FIAVLGHTPEAVQIATGKNAARLCCVTSCDAGLTWGSVRDLTEEAIGAALQDWATFAVGPGH
GVQLRSGRLLVPAYTYHVDRRECFGKICWTSPHSLAFYSDDHGISWHCGGLVPNLRSGECQL
AAVDGDFLYCNARSPLGNRVQALSADEGTSFLPGELVPTLAETARGCQGSIVGFLAPPSIEP
QDDRWTGSPRNTPHSPCFNLRVQESSGEGARGLLERWMPRLPLCYPQSRSPENHGLEPGSDG
DKTSWTPECPMSSDSMLQSPTWLLYSHPAGRRARLHMGIYLSRSPLDPHSWTEPWVIYEGPS
GYSDLAFLGPMPGASLVFACLFESGTRTSYEDISFCLFSLADVLENVPTGLEMLSLRDKAQG
HCWPS
SEQ ID NO: 42:
GGGTCACATGCTGATGGACTAATTGGAGTCGCGGCAGCGCGGGCTGCGGCCCCCAAGGGGAG
GGGTCGGAGTGACGTGCGCGCTTTTAAAGGGCCGAGGTCAGCTGACGGCTTGCCACCGGTGA
CCAGTTCCTGGACAGGGATCGCCGGGAGCTATGGTGGGGGCAGACCCGACCAGACCCCGGGG
ACCGCTGAGCTATTGGGCGGGCCGTCGGGGTCAGGGGCTCGCAGCGATCTTCCTGCTCCTGG
TGTCCGCGGCGGAATCCGAGGCCAGGGCAGAGGATGACTTCAGCCTGGTGCAGCCGCTGGTG
ACCATGGAGCAGCTGCTGTGGGTGAGCGGGAAGCAGATCGGCTCTGTAGACACTTTCCGCAT
CCCGCTCATCACAGCCACCCCTCGGGGCACGCTCCTGGCCTTCGCTGAGGCCAGGAAAAAAT
CTGCATCCGATGAGGGGGCCAAGTTCATCGCCATGAGGAGGTCCACGGACCAGGGTAGCACG
TGGTCCTCTACAGCCTTCATCGTAGACGATGGGGAGGCCTCCGATGGCCTGAACCTGGGCGC
TGTGGTGAACGATGTAGACACAGGGATAGTGTTCCTTATCTATACCCTCTGTGCTCACAAGG
TCAACTGCCAGGTGGCCTCTACCATGTTGGTTTGGAGTAAGGACGACGGCATTTCCTGGAGC
CCACCCCGGAATCTCTCTGTGGATATTGGCACAGAGATGTTTGCCCCTGGACCTGGCTCAGG
CATTCAGAAACAGCGGGAGCCTGGGAAGGGCCGGCTCATTGTGTGTGGACACGGGACGCTGG
AGCGAGATGGGGTCTTCTGTCTCCTCAGTGATGACCACGGTGCCTCCTGGCACTACGGCACT
GGAGTGAGCGGCATTCCCTTTGGCCAGCCCAAACACGATCACGATTTCAACCCCGACGAGTG
CCAGCCCTACGAGCTTCCAGATGGCTCGGTCATCATCAACGCCCGGAACCAGAATAACTACC
ATTGCCGCTGCAGGATCGTCCTCCGCAGCTATGACGCCTGTGACACCCTCAGGCCCCGGGAT
GTGACCTTCGACCCTGAGCTCGTGGACCCTGTGGTAGCTGCAGGAGCACTAGCCACCAGCTC
CGGCATTGTCTTCTTCTCCAATCCAGCCCACCCTGAGTTCCGAGTGAACCTGACCCTGCGCT
GGAGTTTCAGCAATGGTACATCCTGGCAGAAGGAGAGGGTCCAGGTGTGGCCGGGACCCAGC
GGCTACTCGTCCCTGACAGCCCTGGAAAACAGCACGGATGGAAAGAAGCAGCCCCCGCAGCT
GTTCGTTCTGTACGAGAAAGGCCTGAACCGGTACACCGAGAGCATCTCCATGGTCAAAATCA
GCGTCTACGGCACGCTCTGAGCCCCGTGCCCAAAGGACACCAAGTCCTGGTCGCTGACTTCA
CAGCTCTCTGGACCATCTGCAGAGGGTGCCTGAAACACAGCTCTTCCTCTGAACTCTGACCT
TTTGCAACTTCTCATCAACAGGGAAGTCTCTTCGTTATGACTTAACACCCAGCTTCCTCTCG
GGGCAGGAAGTCCCTCCGTCACCAAGAGCACTTTTTTCCAGTATGCTGGGGATGGCCCCTGT
CCATTCTCTTCCAGGACAACGGAGCTGTGCCTTTCTGGGACAGGATGGGGGAGGGGCTCCCC
CTGGAGAGATGAACAGATACGAACTCAGGGAACTGAGAAGGCCCGGTGTCCTAGGGTACAAA
GGCAGGTACTAGATGTGATTGCTGAAAGTCCCCAGGGCAGAGTGTCCTTTCAGAGCAAGGAT
AAGCACACCTACGTGTGCACCTTTGATTATTTATGAATCGAAATATTTGTAACTTAAAATTT
TTGATGCAGAAAAAGCGTTTGTGGAGTCTGTGGTTCTGTCTGCTCACGCCTTCCCAATTGCC
TCCTGGAGAGACAGGAAGGCAGCTGGAAGAGGAGCCGATGTACTTACTGGGAAGCAGAAACC
CCTAGATTCCATCCTGGCTGCTGCTGTTTGCAAGTGTCAAAGATGGGGGGGCGTGTTTATAT
TTTATATTTCTAAGATGGGGTGGCATAGGAAATAGGGAACAGATGTGTAAAACCAGATGGGA
AGGACAGTCTGTGAGAAAGGAGCAAGCAGTTGCTGCAGGTGTGGGAGAGCAAAGCCCTTCTC
CACGTGGAAAGAGCCCAGATGGACGCTAAGCATGTTGGGCACCTGTAACCCCGCACTCGCTG
GACTGACGGTGTAGCTCAGTGGTGGAGCTAGTACTTGGAACGCCTAAGACTCTGGGTTCAGT
CCTTGGGGGGGGGGGTATGTGTTTATTGAGAGGAAGGTGTACGTACTGTAGGTCAGAGGACA
GCTTACTGGAGTTGTCTCTCTCCTTCACGCTGTGAGTCCTGTGGAATGACCTCAGGTGTCAG
AGTTGGGGGCAGGTGCCTTTGCCAGCTGAGCCATCTTGCTGTCTCTGCTTTAATTTAAAAAA
AAAAAAAAAAAAGAATATTAAGGTCTGAGGGATTCGGGCTGCGTTCATTTCAATTAGAGGGT
CATATTTCTTTTGACATTTCTTCTCTAAGAAATGTTAAGATCATTTGTTCTGTGTGATAGAG
GTATAGCTCCATTGTATGTCAGCAGTGAGGGATCCTGTGCATTTTATCCAGAGTTTGTACGG
TGTTCTAGGGGCTGCTAGTGCAGCCCAGTGCTAAACACTTCAGCATGCACAAGGCCTCAATC
AGTGCATGCATGTGCACACACACACAGACACACACGTAGACACTGACACAGGTACACAAATA
CACACTGGCCCACATGTACACATCGACTCACAGGTAGACAGACCCACTTTGACACACATATA
CACAGACACAAACGCACTGGCACACACATATACACAGGCACACATGGATAGATGGACACACG
TGTAGACATACACACACACACAGAAATACAAATGTTCAGGTTTTCTAAAAAAAAAAAAATTA
GAGACGTGTTGACTTCATTTTTAGCAAAAATCCTGTCATGTATCTTAAAGTGGATTGAACCC
ACTATGTAGCCCAGGCTGGCCTCCAAATGGGCATCCTTCTGCCTCAGTCTCCCGAGGGCTAG
GATAACAGGAGTATGCCATCACACCTGGCTAATAGAAATTTTCAAAATTGTTTGTTTGAAGG
TGACTCTTACTATATTGCCTAACTGATCTCCAGTTCGTGAAATCCTCCTGCCTCAGAACCAG
GACTGTCAATATAACCCACCAAGACAGGCCAACATTCACAATTGATTGTTAGTTTGTGGTCT
GAATCAAGGTCTTATACTGTAGCCCAGGCTAGCCCGGAATACACGATATCTCCAGTGCTTCA
GATCCTCAGTTCTAACTAAGCATGGCCACATCCATGTTTAACTGCAAATTTGATGTTACCAT
GGTTTGGTTTGGTTTGGTTTGGTTTGGTTTGGTTTGGTTTGGTTTTTTGGCCATTTTTTTTT
TCTCATGCTGAGGCCTTGTGCTCTCAAGTTGGGGAGACAGCATGGAGGGTAGCTGCAACTGT
AACCCCAGTTCCAGGGGACCTGACACCCTCTGGCCTCCACAAGTATTAGGCACATCTGTGGT
GCACAGACATACAATCAGGCAAAATATTCATACACATAAAATAAAATAATTTAAAACAAAAG
CAAAAATCAGGACCTAAGAAAAAAATCTATTCCTGATTCTTTTATGTTTTGTTTGTATTTTA
TCAAGACAGGGTTGTTTCTCTGTATAGCCCTGGCTGTCTTGGAATTCACTCTGTAGACCAGG
CTGGCCTCAAACTCAGAAATCCTCCTGCCTTTGCCTTCCAAGTGCTGGAATTAAAGGCATGC
GCCACC
SEQ ID NO: 43:
GACATGACCCAAACGGCCCCTGGCTGCAAGGTAATATCGGAAGTTGACTAAGAATGGACGCC
CCACCACTGACTGACCCGCCCCCTGAGTCTGAGATTGGACTTGTCTCTGGATACAGTCATAC
TTTGAGGTACTAGAAGTTAGAAACTGTTAGGTTACTCAGTTCAGTCCATGACAGTCCAACCT
TCTCCATGGTTTTCCGATCTCAGGCCCATGGCGACCTGCCCTGTCCTGCAGAAGGAGACACT
GTTCCGCACAGGCGTCCATGCTTACAGAATCCCTGCTCTGCTCTACCTGAAGAAGCAGAAGA
CCCTGCTGGCCTTTGCGGAAAAGCGAGCCAGCAAGACGGATGAGCACGCAGAGTTGATTGTC
CTGAGAAGAGGAAGCTACAACGAAGCCACCAACCGTGTCAAGTGGCAGCCTGAGGAAGTGGT
GACCCAAGCCCAGCTGGAAGGCCACCGCTCCATGAATCCATGTCCCTTGTATGACAAGCAAA
CAAAGACCCTCTTCCTTTTCTTCATCGCTGTCCCTGGGCGTGTATCAGAACATCATCAGCTC
CACACTAAGGTTAATGTCACACGGCTGTGCTGTGTCAGCAGCACTGACCATGGGAGGACCTG
GAGCCCCATCCAGGACCTCACAGAGACCACCATTGGCAGCACTCATCAGGAATGGGCCACAT
TTGCTGTGGGTCCTGGGCATTGTCTGCAGCTGCGGAACCCAGCTGGGAGCCTGCTGGTACCT
GCTTATGCCTACCGGAAACTGCACCCTGCTCAGAAGCCTACCCCCTTTGCCTTCTGCTTCAT
CAGCCTTGACCATGGGCACACATGGAAACTAGGCAACTTTGTGGCTGAAAACTCACTGGAGT
GCCAGGTGGCTGAGGTTGGCACTGGAGCTCAGAGGATGGTATATCTCAATGCTAGGAGCTTC
CTGGGAGCCAGGGTCCAGGCACAAAGTCCTAATGATGGTCTGGATTTCCAGGACAACCGGGT
AGTGAGTAAGCTTGTAGAGCCCCCCCACGGGTGTCATGGAAGTGTGGTTGCCTTCCACAACC
CCATCTCTAAGCCACATGCCTTAGACACATGGCTTCTTTATACACACCCTACAGACTCCAGG
AATAGAACCAACCTGGGTGTGTACCTAAACCAGATGCCACTAGATCCCACAGCCTGGTCAGA
GCCCACCCTGCTGGCCATGGGCATCTGTGCCTACTCAGACTTACAGAACATGGGGCAAGGCC
CTGATGGCTCCCCACAGTTTGGGTGTCTGTATGAATCAGGTAACTATGAAGAGATCATTTTC
CTCATATTCACCCTGAAGCAAGCTTTCCCCACTGTATTTGATGCCCAGTGATCTCAGTGCAC
GTGGCCCAAAGGGCTTCCTTGTGCTTCAAAACACCCATCTCTCTTTGCTTCCAGCATCCTCT
GGACTCTTGAGTCCAGCTCTTGGGTAACTTCCTCAGGAGGATGCAGAGAATTTGGTCTCTTG
ACTCTCTGCAGGCCTTATTGTTTCAGCCTCTGGTTCTCTTTTCAGCCCAGAAATCAAAGGAG
CCTGGCTTTCCTCAGCCTGTTGGCAGGGCAGGTGGGGACAGTATATATAGAGGCTGCCATTC
TGCATGTCGGTTGTCACTATGCTAGTTTAACCTGCCTGTTTCCCCATGCCTAGTGTTTGAAT
GAGTATTAATAAAATATCCAACCCAGCCCATTTCTTCCTGGAAAAAAA
SEQ ID NO: 44:
ACTGCGCGGTGAAGGGGCGTGGCCTGGCCGGGGAGGTTGACACCCAGACGCTGCTCTCAGTC
CTCTGGCGCCTGCTCCCCAGCGCATTCCTTCTGCTCCTGGGATATTTGTCTCATTACTGCCA
GTTCTTGCGCAGCGGTCACTGGGTTCGTTTCAGCGTCTGTGGTTTCTGTCGCTGTTATCCAG
TCTCCATCGCCCCAGCTCAGCTTCAGGCCTTCTTCCGAGACTCCACGGGAGAGCCCAGAGAG
CCTCCGGAGCCGAAGCCATGGAGGAAGTCCCACCCTACTCCCTCAGCAGCACCCTGTTCCAG
CAGGAAGAACAGAGTGGGGTGACCTACCGGATCCCAGCCCTGCTGTACCTTCCTCCCACCCA
CACCTTCCTGGCCTTTGCAGAGAAGCGGACCTCAGTCAGAGATGAGGATGCTGCCTGCCTGG
TGCTCAGACGAGGGCTGATGAAGGGGCGCTCTGTACAGTGGGGCCCCCAACGGCTACTGATG
GAGGCCACATTACCTGGGCATCGCACCATGAACCCCTGCCCTGTGTGGGAGAAAAATACTGG
CCGTGTGTACCTGTTTTTCATCTGTGTGCGGGGCCATGTTACTGAGAGGTGCCAGATTGTGT
GGGGCAAAAATGCCGCCCGTCTCTGCTTCCTTTGCAGTGAAGATGCCGGCTGCTCTTGGGGT
GAAGTGAAAGACTTGACCGAGGAGGTCATTGGCTCAGAGGTGAAGCGCTGGGCCACATTTGC
TGTGGGCCCAGGTCATGGCATCCAGCTACACTCGGGAAGGCTGATCATCCCCGCCTATGCCT
ACTATGTCTCACGTTGGTTTCTCTGCTTTGCGTGTTCAGTCAAGCCCCATTCCCTGATGATC
TACAGTGATGACTTTGGAGTCACATGGCACCATGGCAAGTTCATTGAGCCCCAGGTGACAGG
GGAGTGCCAAGTGGCCGAAGTGGCTGGGACGGCTGGTAACCCTGTGCTCACTGCAGTGCCCG
AACACCAAGCCGATTTCGAGCAGAGGCTTTTAGTACTGATAGTGGTGGCTGCTTTCAGAAGC
CAACCCTGAACCCACAACTCCATGAGCCTCGAACCGGCTGCCAAGGTAGTGTAGTGAGCTTC
CGGCCTTTGAAGATGCCAAATACCTATCAAGACTCAATTGGCAAAGGTGCTCCCGCTACTCA
GAAGTGCCCTCTGCTGGACAGTCCTCTGGAGGTGGAGAAAGGAGCTGAAACACCATCAGCAA
CATGGCTCTTGTACTCACATCCAACTAGCAAGAGGAAGAGGATTAACCTAGGCATCTACTAC
AACCGGAACCCCTTGGAGGTGAACTGCTGGTCCCGCCCGTGGATCTTGAACCGTGGGCCCAG
TGGCTACTCTGATCTGGCTGTTGTGGAAGAACAGGACTTGGTGGCGTGTTTGTTTGAGTGTG
GGGAGAAGAATGAGTATGAGCGGATTGACTTCTGTCTGTTTTCAGACCATGAGGTCCTGAGC
TGTGAAGACTGTACCAGCCCTAGTAGCGACTAAAGCCAAATCAAGACGGATGAGTGAGGCCC
AGCTTCCCACAGAAAGGAATGGCAGCTACAGCCAGGGTAACAGAGGTCTCTGATGTCTAGAG
AAAACTCTAAAAACTAATAATCTGCTCCTTGAATTTTTTCACTTTTCCCTTCAATGAGCATG
GTGAAAATTGTGCCATATCTTACATAACGAGGCTCTTGAACTGGGAGTTTGAATCTCTTCTC
TTCCCATTAAAAGGAGAGGCCATGTGCTCGCTTCGCGTTCGACAAAGCCTGGATTCTGATCT
TGAGTGGAAGCCACAGGCTTGTCTTTTCCAATGGTTCACTGCTCACCTGAGTATTAGGTGAT
GTGTAGGTGCCTTGGCCAGAAGAAAGATCTGTGTTGTTGTATTTTTTTAAATTTATTTATTT
ACTATATGTAAGTAGACTGCAGCTGTCTTCAGACACACCAGAAGAGGGCGTCAGATCTCATT
AGAGATGGTTGTGAGCCACCATGTGGTTGCTGGGATTTGAACTCAGGACCTTCAGAAGAGCA
GTCAGTGCTCTTAACTACTGAGCCATCTCTCAAGCCCCGCATTGCTGTATTTTTAATAAGAA
AAATGCCCTTATCCTTCCAATAATGCCTGGAGCTGTACAAATTCTCTGTCTTAGAAGACTTG
AGAAAGCAGAACTGTAAGGTCAGATGCTTTCTCCAGCCTTGATGCTGTGTTCCACCTTCCCT
TCCTCATCCAGAAAACAGTTACTAGGGAGAAAATGAGAAACCCATGCCAGCTGCCCTTGATG
ATGGTTGATAACGGTGCTTATTGCTTTTGATGTCATTACCTCTGTTAGAGATGAATCAGAGT
CAGAGGTCCTTAGCTGCATCCACCCATTTCCAGGGGGACATTCTAACACTGCTGAACAGTCA
GCTAAAATGAGAGCTGTGTGTCCTAGCCTGATTCCAGGTTAGTCATGATGCTTCCTGGAGCT
GGGCTTTTATCTAATCCCAGGAGCCATCTAGGGGAGGCTCAGAGCTAGCAGGTGATCTTCCT
GAGATGGTTTCACCGTGACAGGTGAACCATGAGCCCTTCCAAGCAAGGCCAAAGGACAACAT
TATAGGAAAGATTTCTAGTATTAATATGCCTTTTCTCTGTGTGTGTACTGTCTTGTAGTGAT
GCTATATAGACAAATAGATGATTTCTTATTTTTTGTTTGTTTGTTTGTTTTTTTGTTTTTCT
GTAGCCCTAGCTGTCCTGGAACTCACTTTGTAAACCAGGCTGGCCTCGATCTCAGAAATCCG
CCTGCCTCTGCCTCCCGAGTGCTGGGATTAAAGGTGTGCACCACCACACCTTAATGATGATC
CTATAAGTATTCCTAAAATTATACTAGTAATTATTAACTCCTTTATAATAGGACTGCTATTA
AAGCCCTCGCTGATATGAAAACTAGAGTGAGAACTCTGCCAGTCTTCACATGTCATAATTAC
TTCTGAGATAGAAAGCAGGCATTTACAACTTAGAACACATTTCTTAGAGCTGTAAAACAATT
AACTAGAGGTCATAAAAGGGAATGAAAGATTTATTGTAGGTGCTAGGACAGAACATAAAATA
TTGACTGGGCTTATCTATATGAAACTTCATTGTTAACTTTTACACAAGAATTATGGTTTTTA
ACTTTCAGTGAACCTGCGGAGCTAGTGACAGAAGAGAAATGTCTAGTTAGATAACTACTCTT
AATGGAAATTCACATAAACATCTGTTGCCATCTTCTTTTTGAATTTATGTTTAAACTTGTGA
ATGTTTGAATTAGACACTACGCGAGCACATAGAAAATAAAGAACTAAGCGTGAA
SEQ ID NO: 45:
GGACAGTGTGCATCACGGAGCTTGTGGCCCAGACTGTGCCTGGCAGACCCAGAGGACCTAAG
GCTTGGCTCTAGTGGTGGTCAGCACAGCCCTCGGTGGTCTGCGGAGCCTGATATTGCTTTAC
GTAAGGGCTGTTCTGCTGTGCATCTCCTGTGTCTGAAGCTATTCGCCATGGAGACTGCTGGA
GCTCCCTTCTGCTTCCATGTGGACTCCCTGGTACCTTGCTCCTACTGGAAGGTTATGGGGCC
CACGCGTGTTCCCAGGAGAACGGTGCTCTTCCAGAGGGAAAGGACGGGCCTGACCTACCGTG
TGCCTGCGTTACTCTGTGTGCCTCCCAGGCCTACTCTGCTGGCCTTCGCGGAACAGCGACTT
AGCCCTGATGACTCCCATGCCCACCGCCTGGTGCTACGGAGGGGCACGCTGACCAGGGGCTC
AGTGCGGTGGGGCACTCTGAGTGTACTGGAGACTGCAGTACTGGAGGAGCACAGGTCTATGA
ACCCTTGCCCGGTGCTGGATGAGCACTCTGGTACCATCTTCCTCTTCTTCATTGCCGTGCTG
GGCCACACACCGGAGGCCGTGCAAATCGCCACTGGCAAGAACGCTGCTCGCCTCTGCTGTGT
GACCAGCTGTGACGCTGGCCTCACCTGGGGCAGTGTTCGAGATCTCACTGAGGAAGCCATTG
GTGCTGCATTGCAGGACTGGGCCACCTTTGCTGTGGGTCCGGGCCATGGAGTTCAGCTGCGC
TCGGGTCGCCTGCTTGTTCCTGCTTACACCTATCATGTGGACCGACGGGAATGTTTTGGCAA
GATCTGCTGGACCAGTCCCCACTCCTTGGCATTCTACAGTGATGATCATGGGATCTCCTGGC
ATTGTGGAGGCCTTGTGCCCAACCTACGCTCTGGAGAGTGCCAACTGGCTGCGGTAGATGGA
GACTTTCTCTACTGTAATGCTCGAAGCCCTCTGGGTAACCGTGTGCAGGCACTGAGTGCTGA
TGAAGGCACGTCCTTCCTACCAGGGGAGCTGGTGCCTACATTGGCAGAGACGGCTCGTGGTT
GCCAGGGTAGCATTGTGGGCTTCCTAGCTCCACCCTCAATCGAGCCTCAGGATGACCGGTGG
ACAGGGAGTCCTAGGAACACCCCACATTCCCCATGCTTCAATCTCAGAGTACAGGAGTCTTC
GGGGGAAGGTGCCAGAGGTCTTCTTGAACGTTGGATGCCCAGGTTGCCTCTCTGCTACCCAC
AGTCCCGGAGCCCAGAGAATCATGGCCTAGAGCCTGGGTCAGATGGAGATAAGACATCCTGG
ACTCCGGAATGTCCTATGTCCTCTGATTCCATGCTTCAGAGCCCCACATGGCTACTATATTC
CCACCCAGCAGGGCGTAGAGCTCGGCTCCACATGGGAATCTACCTGAGCCGATCCCCCTTGG
ATCCCCACAGCTGGACAGAGCCCTGGGTGATCTATGAGGGCCCCAGTGGCTACTCTGACCTT
GCCTTTCTTGGGCCTATGCCTGGGGCATCCCTGGTTTTTGCCTGTCTGTTTGAGAGCGGGAC
CAGGACTTCCTATGAAGACATTTCTTTTTGCTTGTTCTCACTGGCGGATGTCCTGGAGAATG
TGCCCACTGGCTTAGAGATGCTAAGTCTCAGGGATAAGGCTCAGGGGCATTGCTGGCCCTCT
TGATGGCCTCACCCTCTCGTAGCCGCCTGGAGAGGAAGGGTAGACTATATAGAGGAGGTTAG
GGGTAGGTCAGCATGATGCTAGGATGGAGAGAGCTCTGTCCCCTCGTGGATGGTGGTGGTGA
CTCACCCGGGGGGCCAGCTGCTTTCTGAGTGCAAATGAGAAAAATAAAGAGCTGCGCTGTGA
CTTTTCTTTCCACATCAAAGCTTGGGTGTCAGTGCTTTAGCTTGATGCTCTGATCACCATGC
AAATCTTCCACCGGCGCCTTGCTCAGCTTTCATATCCCAAGGGTGCCTGGGAGGAAGGCAAC
AGGGACAGTGGACATCACTGCACCACTTTCCACGACCCTGTGTGCCAACCTCAGCCACTTTG
AAACATGCTGATGACTGAGGTCTGTTCACTTTCTTAATTTCAAGCAGGAGAAGCAGGTTGGG
GAGCCAGCCTCCCCAGCTAGAGGGGACAGAACTTGACTTGAGCAGGGGGGTACCTCCTAGGA
CCTGCTCCATGTGCCTACTTCTTTACCCTTCTCTAGAGAGGGCTCTTGTCCTGTCAGAGCTG
TTTTCTCCCTTCTCTTGTTTTTTCTTTTTCAAGACTGTTTCTCTGTGTTAGCCCTGGCTGTC
CTGGATCTCACTCTGTAGATCAGGCTGACCTTGAGTTCAAAGCTCCATCTGCCTCTACTTCT
CACATTACTGTGATTAAAGGCATATACTACCACTGCCTGGTGCCCTTTTGTATTTCTTATTA
AAGTCCTAATGTCTGATTATAAAAACAGTCTGTGTGGGCTGGAGTGATGGCTTACTCAGTAA
AGCACTTGCCATGGAATCTGGGCAATCTGAGTTTCATTTTTAGCATCCTGTAAAAATCCCAA
TTTGATGGTGTACTTGTAATGTCAGCATGGAGAGGCAGAGATAGGTAAGTTCCCCAAGACTC
TTTGAACCGACAGCTTGGCCTCACTGGCACATTCCAGGTCTCAGTGAGAGACCCTGCCTCAA
AATACAAAGAAAGAGCTGCTGAAGAGTGGGTCAGAGTTGACCTCTGATCTCCGGAAGTATAT
GATACACACCCGTGCATGCACTCTTCCTTACAAAATAAAAAGCAAAACAAAACCCCAACAGG
TATATGGCCATTTTAGAAAAATTAGAAGATTTAGAAAGCTATACATAAAAAAAAATGACCTA
AAGAAAAATCTTTACTGTTCTGGGCACTATCCCTATCAAACCACTGTGTTCTTTGGCCAAGC
CTTGGGGTGGACACTGTTTTGAGGTGGGTCCTGTTATCTCCACTAGGTAGTGGAGTTTTGTG
TCAGACTAACTGGGTCTTAAAGCTGTCTTTAAGGCCATCAGGAGCTACTGACTTGCCTGCCT
CAGCAGAGCATATCCTGAAGGTCGGGGTTAAGTCTCCTTCCCGAGCGAGTTGCCTTCCAGTG
GGCCCCTGGACTCCTAGGTCCTCAGCGCTCATCAGCTGCCAAGGACTCTGAGGGAATGTCCT
CTGACTGTGGCCCCGAAAGGTAGGGGAGGGGGATGTGCTTAGGCTTAGGACAGGGTCCTGTT
TCAGTCTGCCTTCACTGTTAGTAGCACTGTGCCACATGGCACAGACTGGGCGAGCTTTAAAG
GAAGGAGGTTGATATTGGTTCCCACTTCTGGGGATCATGGTTGAGCAGCCTTGTCTGATGAT
GGTTGTCTTGATGGTAGATCGTGAGGTAGTTGATGAAGGTATGACATGGTGAGAAACTCTGT
GTGTGTGTGTTATTTTCTCTGTGTTCTACCTATACATCTATCTATGTATATATGTATCTATC
TATCTACCTGGAGGCTGGAGAGATAGCTTAGTGGTTAAGAACATTTGTTGTTCTTGCATAGT
CCTGGATTTAAATTTTCAGCACCCACATGGGAGCTCACAACAACCCATAAATCCAGTTTCAG
AGGATCCAACCTCTGATATACCATGTCAGCCAGAGCAGACACGGCTGAAGGTGGTTTGATCC
CCGTATGGAGAGGTGACAATTGGGAAGAGAGAAAGATCAACTTAACCATGCAAGGAACAGGA
AGTTAAATACTGAACAGGGAAGGTAAAGGCAGGAAGTAGATGTAGAGGGCAAATCAATGAAA
CCCAAACATACCCAAATTACGCTAAACACACACTGACATGCCAATTAAAAGGACAAATTGGC
TCCACTGGCAAAACCAAAACAGACACTGAAGATCCAAACAGTCACATGCCAACTACCGCGGA
GGGAGACAGACACAGAGAAGACCGTGACAGACACTTGGACACTCTTGAGAGTGGATGTGCAG
GAAGAGAGCTCTGCCAGTGGAGAAGAAAGCACTCAGAAGAAAGTGACAGCAGCTGTAAATTT
GTATTCTGCTAATGTTATGTTCCAAAGTTGAAAGCAAAATTGTACCAATTCATAAGAACAAA
CAGGCTGACTCTCAGTTGTGACTGAACGTCTCTCAGTAACTGACGGGGCGAGCAGGCCAAAG
GAGAGTCGGCTCAGAAGGGTGCATAGCCACGCCAAATCAAATAAGCAAGTACAACCGGCAGG
CTCTATTTCTAGCACAAAGGGGTCTGTGCCTCATTCTGTGCTTGGGTCAGAGCTTGGGTCTC
TCATTTGGATGTAAGTGGTGTAGTGGAGAAGCAGGAAATAATCCGGAGCGCATATTTTGATT
TTAACATAAGTGCTGATTTGGGAGGGAGTTTTGTCAAATTGTGTTTTTACAATGTTTTTTTT
TTTTTAAATGATGCTTTTTTGTAAAGTGTACAAATGTGATATAAGATTGGTTCTGCTACATT
CAGTTTCTATAAAAGTGGTTCTAAAATATTGTACTGTCAATCATCTCATGATTATTCTACTG
TAGACATTACTGACTTTGTATGTAATAATTAATATTAGAAGAAAATATAATTTATTTGAATA
TAAAAAAAAAAAAAAAAAAA
SEQ ID NO: 46:
X₁ASLPX₂LQX₃ESVFQSGAHAYRIPALLYLPGQQSLLAFAEQRASKKDEHAELIVLRRGDYD
AX₄THQVQWQAQEVVAQARLDGHRSMNPCPLYDX₅QTGTLFLFFIAIPGQVTEQQQLQTRANV
TRLCQVTSTDHGRTWSSPRDLTDAAIGPAYREWSTFAVGPGHCLQLHDRARSLVVPAYAYRK
LHPX₆QRPIPSAFCFLSHDHGRTWARGHFVAQDTLECQVAEVETGEQRWTLNARSHLRARVQ
AQSTNDGLDFQESQLVKKLVEPPPX₇GCQGSVISFPSPRSGPGSPAQWLLYTHPTHX₈X₉QRA
DLGAYLNPRPPAPEAWSEPVLLAKGSX₁₀AYSDLQSMGTGPDGSPLFGCLYEANDYEEIX₁₁FX₁₂
MFTLKQAFPAEYLPQ
SEQ ID NO: 47:
X₁X₂SX₃X₄X₅LQX₆ESVFQSGAHAYRIPALLYLPGQQSLLAFAEQRASX₇X₈DEHAELIVX₉RR
GDYDAX₁₀THQVQWX₁₁AQEVVAQAX₁₂LDGHRSMNPCPLYDX₁₃QTGTLFLFFIAIPX₁₄X₁₅VT
EX₁₆QQLQTRANVTRLX₁₇X₁₈VTSTDHGRTWSSPRDLTDAAIGPX₁₉YREWSTFAVGPGHX₂₀LQ
LHDRX₂₁RSLVVPAYAYRKLHPX₂₂QRPIPSAFX₂₃FLSHDHGRTWARGHFVAQDTX₂₄ECQVAE
VETGEQRVVTLNARSHLRARVQAQSX₂₅NX₂₆GLDFQX₂₇SQLVKKLVEPPPX₂₈GX₂₉QGSVISF
PSPRSGPGSPAQX₃₀LLYTHPTHX₃₁X₃₂QRADLGAYLNPRPPAPEAWSEPX₃₃LLAKGSX₃₄AYS
DLQSMGTGPDGSPLFGX₃₅LYEANDYEEIX₃₆FX₃₇MFTLKQAFPAEYLPQ
SEQ ID NO: 48:
DASLPYLQKESVFQSGAHAYRIPALLYLPGQQSLLAFAEQRASKKDEHAELIVLRRGDYDAG
THQVQWQAQEVVAQARLDGHRSMNPCPLYDEQTGTLFLFFIAIPGQVTEQQQLQTRANVTRL
CQVTSTDHGRTWSSPRDLTDAAIGPAYREWSTFAVGPGHCLQLHDRARSLVVPAYAYRKLHP
KQRPIPSAFCFLSHDHGRTWARGHFVAQDTLECQVAEVETGEQRVVTLNARSHLRARVQAQS
TNDGLDFQESQLVKKLVEPPPQGCQGSVISFPSPRSGPGSPAQWLLYTHPTHSWQRADLGAY
LNPRPPAPEAWSEPVLLAKGSAAYSDLQSMGTGPDGSPLFGCLYEANDYEEIVFLMETLKQA
FPAEYLPQ
SEQ ID NO: 49:
DASLPYLQDESVFQSGAHAYRIPALLYLPGQQSLLAFAEQRASKKDEHAELIVLRRGDYDAP
THQVQWQAQEVVAQARLDGHRSMNPCPLYDEQTGTLFLFFIAIPGQVTEQQQLQTRANVTRL
CQVTSTDHGRTWSSPRDLTDAAIGPAYREWSTFAVGPGHCLQLHDRARSLVVPAYAYRKLHP
KQRPIPSAFCFLSHDHGRTWARGHFVAQDTLECQVAEVETGEQRVVTLNARSHLRARVQAQS
TNDGLDFQESQLVKKLVEPPPQGCQGSVISFPSPRSGPGSPAQWLLYTHPTHSWQRADLGAY
LNPRPPAPEAWSEPVLLAKGSAAYSDLQSMGTGPDGSPLFGCLYEANDYEEIRFIMFTLKQA
FPAEYLPQ
SEQ ID NO: 50:
DASLPYLQKESVFQSGAHAYRIPALLYLPGQQSLLAFAEQRASKKDEHAELIVLRRGDYDAN
THQVQWQAQEVVAQARLDGHRSMNPCPLYDAQTGTLFLFFIAIPGQVTEQQQLQTRANVTRL
CQVTSTDHGRTWSSPRDLTDAAIGPAYREWSTFAVGPGHCLQLHDRARSLVVPAYAYRKLHP
KQRPIPSAFCFLSHDHGRTWARGHFVAQDTLECQVAEVETGEQRVVTLNARSHLRARVQAQS
TNDGLDFQESQLVKKLVEPPPQGCQGSVISFPSPRSGPGSPAQWLLYTHPTHSWQRADLGAY
LNPRPPAPEAWSEPVLLAKGSAAYSDLQSMGTGPDGSPLFGCLYEANDYEEIVFLMFTLKQA
FPAEYLPQ
SEQ ID NO: 51:
DASLPYLQKESVFQSGAHAYRIPALLYLPGQQSLLAFAEQRASKKDEHAELIVLRRGDYDAP
THQVQWQAQEVVAQARLDGHRSMNPCPLYDAQTGTLFLFFIAIPGQVTEQQQLQTRANVTRL
CQVTSTDHGRTWSSPRDLTDAAIGPAYREWSTFAVGPGHCLQLHDRARSLVVPAYAYRKLHP
KQRPIPSAFCFLSHDHGRTWARGHFVAQDTLECQVAEVETGEQRVVTLNARSHLRARVQAQS
TNDGLDFQESQLVKKLVEPPPAGCQGSVISFPSPRSGPGSPAQWLLYTHPTHRKQRADLGAY
LNPRPPAPEAWSEPVLLAKGSAAYSDLQSMGTGPDGSPLFGCLYEANDYEEIVFLMFTLKQA
FPAEYLPQ
SEQ ID NO: 52:
DASLPYLQKESVFQSGAHAYRIPALLYLPGQQSLLAFAEQRASKKDEHAELIVLRRGDYDAS
THQVQWQAQEVVAQARLDGHRSMNPCPLYDAQTGTLFLFFIAIPGQVTEQQQLQTRANVTRL
CQVTSTDHGRTWSSPRDLTDAAIGPAYREWSTFAVGPGHCLQLHDRARSLVVPAYAYRKLHP
KQRPIPSAFCFLSHDHGRTWARGHFVAQDTLECQVAEVETGEQRVVTLNARSHLRARVQAQS
TNDGLDFQESQLVKKLVEPPPAGCQGSVISFPSPRSGPGSPAQWLLYTHPTHRKQRADLGAY
LNPRPPAPEAWSEPVLLAKGSAAYSDLQSMGTGPDGSPLFGCLYEANDYEEIVFLMFTLKQA
FPAEYLPQ
SEQ ID NO: 53:
DASLPYLQKESVFQSGAHAYRIPALLYLPGQQSLLAFAEQRASKKDEHAELIVLRRGDYDAT
THQVQWQAQEVVAQARLDGHRSMNPCPLYDAQTGTLFLFFIAIPGQVTEQQQLQTRANVTRL
CQVTSTDHGRTWSSPRDLTDAAIGPAYREWSTFAVGPGHCLQLHDRARSLVVPAYAYRKLHP
KQRPIPSAFCFLSHDHGRTWARGHFVAQDTLECQVAEVETGEQRVVTLNARSHLRARVQAQS
TNDGLDFQESQLVKKLVEPPPAGCQGSVISFPSPRSGPGSPAQWLLYTHPTHRKQRADLGAY
LNPRPPAPEAWSEPVLLAKGSAAYSDLQSMGTGPDGSPLFGCLYEANDYEEIVFLMFTLKQA
FPAEYLPQ
SEQ ID NO: 54:
DASLPYLQKESVFQSGAHAYRIPALLYLPGQQSLLAFAEQRASKKDEHAELIVLRRGDYDAN
THQVQWQAQEVVAQARLDGHRSMNPCPLYDAQTGTLFLFFIAIPGQVTEQQQLQTRANVTRL
CQVTSTDHGRTWSSPRDLTDAAIGPAYREWSTFAVGPGHCLQLHDRARSLVVPAYAYRKLHP
KQRPIPSAFCFLSHDHGRTWARGHFVAQDTLECQVAEVETGEQRVVTLNARSHLRARVQAQS
TNDGLDFQESQLVKKLVEPPPAGCQGSVISFPSPRSGPGSPAQWLLYTHPTHRKQRADLGAY
LNPRPPAPEAWSEPVLLAKGSAAYSDLQSMGTGPDGSPLFGCLYEANDYEEIVFLMFTLKQA
FPAEYLPQ
SEQ ID NO: 55:
ASLPYLQKESVFQSGAHAYRIPALLYLPGQQSLLAFAEQRASKKDEHAELIVLRRGDYDAPT
HQVQWQAQEVVAQARLDGHRSMNPCPLYDAQTGTLFLFFIAIPGQVTEQQQLQTRANVTRLC
QVTSTDHGRTWSSPRDLTDAAIGPAYREWSTFAVGPGHCLQLHDRARSLVVPAYAYRKLHPK
QRPIPSAFCFLSHDHGRTWARGHFVAQDTLECQVAEVETGEQRVVTLNARSHLRARVQAQST
NDGLDFQESQLVKKLVEPPPQGCQGSVISFPSPRSGPGSPAQWLLYTHPTHSWQRADLGAYL
NPRPPAPEAWSEPVLLAKGSCAYSDLQSMGTGPDGSPLFGCLYEANDYEEIVFLMFTLKQAF
PAEYLPQ
SEQ ID NO: 56:
MASLPYLQKESVFQSGAHAYRIPALLYLPGQQSLLAFAEQRASKKDEHAELIVLRRGDYDAP
THQVQWQAQEVVAQARLDGHRSMNPCPLYDAQTGTLFLFFIAIPGQVTEQQQLQTRANVTRL
CQVTSTDHGRTWSSPRDLTDAAIGPAYREWSTFAVGPGHCLQLHDRARSLVVPAYAYRKLHP
KQRPIPSAFCFLSHDHGRTWARGHFVAQDTLECQVAEVETGEQRVVTLNARSHLRARVQAQS
TNDGLDFQESQLVKKLVEPPPQGCQGSVISFPSPRSGPGSPAQWLLYTHPTHSWQRADLGAY
LNPRPPAPEAWSEPVLLAKGSCAYSDLQSMGTGPDGSPLFGCLYEANDYEEIVFLMFTLKQA
FPAEYLPQ
SEQ ID NO: 57:
ASLPYLQKESVFQSGAHAYRIPALLYLPGQQSLLAFAEQRASKKDEHAELIVLRRGDYDAPT
HQVQWQAQEVVAQARLDGHRSMNPCPLYDAQTGTLFLFFIAIPGQVTEQQQLQTRANVTRLC
QVTSTDHGRTWSSPRDLTDAAIGPAYREWSTFAVGPGHCLQLHDRARSLVVPAYAYRKLHPK
QRPIPSAFCFLSHDHGRTWARGHFVAQDTLECQVAEVETGEQRVVTLNARSHLRARVQAQST
NDGLDFQESQLVKKLVEPPPQGCQGSVISFPSPRSGPGSPAQWLLYTHPTHSWQRADLGAYL
NPRPPAPEAWSEPVLLAKGSAAYSDLQSMGTGPDGSPLFGCLYEANDYEEIVFLMFTLKQAF
PAEYLPQ
SEQ ID NO: 58:
DASLPYLQKESVFQSGAHAYRIPALLYLPGQQSLLAFAEQRASKKDEHAELIVLRRGDYDAP
THQVQWQAQEVVAQARLDGHRSMNPCPLYDAQTGTLFLFFIAIPGQVTEQQQLQTRANVTRL
CQVTSTDHGRTWSSPRDLTDAAIGPAYREWSTFAVGPGHCLQLHDRARSLVVPAYAYRKLHP
KQRPIPSAFCFLSHDHGRTWARGHFVAQDTLECQVAEVETGEQRVVTLNARSHLRARVQAQS
TNDGLDFQESQLVKKLVEPPPQGCQGSVISFPSPRSGPGSPAQWLLYTHPTHSWQRADLGAY
LNPRPPAPEAWSEPVLLAKGSAAYSDLQSMGTGPDGSPLFGCLYEANDYEEIVFLMFTLKQA
FPAEYLPQ
SEQ ID NO: 59:
DASLPYLQKESVFQSGAHAYRIPALLYLPGQQSLLAFAEQRASKKDEHAELIVLRRGDYDAP
THQVQWQAQEVVAQARLDGHRSMNPCPLYDAQTGTLFLFFIAIPGQVTEQQQLQTRANVTRL
CQVTSTDHGRTWSSPRDLTDAAIGPAYREWSTFAVGPGHCLQLHDRARSLVVPAYAYRKLHP
KQRPIPSAFCFLSHDHGRTWARGHFVAQDTLECQVAEVETGEQRVVTLNARSHLRARVQAQS
TNDGLDFQESQLVKKLVEPPPQGCQGSVISFPSPRSGPGSPAQWLLYTHPTHSWQRADLGAY
LNPRPPAPEAWSEPVLLAKGSCAYSDLQSMGTGPDGSPLFGCLYEANDYEEIVFLMFTLKQA
FPAEYLPQ
SEQ ID NO: 60:
AASLPYLQKESVFQSGAHAYRIPALLYLPGQQSLLAFAEQRASKKDEHAELIVLRRGDYDAP
THQVQWQAQEVVAQARLDGHRSMNPCPLYDAQTGTLFLFFIAIPGQVTEQQQLQTRANVTRL
CQVTSTDHGRTWSSPRDLTDAAIGPAYREWSTFAVGPGHCLQLHDRARSLVVPAYAYRKLHP
KQRPIPSAFCFLSHDHGRTWARGHFVAQDTLECQVAEVETGEQRVVTLNARSHLRARVQAQS
TNDGLDFQESQLVKKLVEPPPQGCQGSVISFPSPRSGPGSPAQWLLYTHPTHSWQRADLGAY
LNPRPPAPEAWSEPVLLAKGSAAYSDLQSMGTGPDGSPLFGCLYEANDYEEIVFLMFTLKQA
FPAEYLPQ
SEQ ID NO: 61:
MASLPYLQKESVFQSGAHAYRIPALLYLPGQQSLLAFAEQRASKKDEHAELIVLRRGDYDAP
THQVQWQAQEVVAQARLDGHRSMNPCPLYDAQTGTLFLFFIAIPGQVTEQQQLQTRANVTRL
CQVTSTDHGRTWSSPRDLTDAAIGPAYREWSTFAVGPGHCLQLHDRARSLVVPAYAYRKLHP
KQRPIPSAFCFLSHDHGRTWARGHFVAQDTLECQVAEVETGEQRVVTLNARSHLRARVQAQS
TNDGLDFQESQLVKKLVEPPPQGCQGSVISFPSPRSGPGSPAQWLLYTHPTHSWQRADLGAY
LNPRPPAPEAWSEPVLLAKGSAAYSDLQSMGTGPDGSPLFGCLYEANDYEEIVFLMFTLKQA
FPAEYLPQ
SEQ ID NO: 62:
AASLPYLQKESVFQSGAHAYRIPALLYLPGQQSLLAFAEQRASKKDEHAELIVLRRGDYDAP
THQVQWQAQEVVAQARLDGHRSMNPCPLYDAQTGTLFLFFIAIPGQVTEQQQLQTRANVTRL
CQVTSTDHGRTWSSPRDLTDAAIGPAYREWSTFAVGPGHCLQLHDRARSLVVPAYAYRKLHP
KQRPIPSAFCFLSHDHGRTWARGHFVAQDTLECQVAEVETGEQRVVTLNARSHLRARVQAQS
TNDGLDFQESQLVKKLVEPPPQGCQGSVISFPSPRSGPGSPAQWLLYTHPTHSWQRADLGAY
LNPRPPAPEAWSEPVLLAKGSCAYSDLQSMGTGPDGSPLFGCLYEANDYEEIVFLMFTLKQA
FPAEYLPQ
SEQ ID NO: 63:
MNPNQKIIALGSVSLTIAAICLLMQIAILATTMTLHLQQDGCTNPPNNQAVPHEPIIIERNR
TEIVYVNNTTIEKENCPKVAEYKNWSKPQCQITGFAPFSKDNSIRLSAGGDIWVTREPYVSC
GLGKCYQFALGQGTTLNNRHSNGTTHDRSPHRTLLMNELGVPFHLGTKQVCIAWSSSSCHDG
KAWLHVCITGDDRNATASIIYDGLLTDSIGTWSKNILRTQESECICINGTCTVVMTDGSASG
WADTRILFIREGKIVHISPLSGSAQHVEECSCYPRYPEVRCVCRDNWKGSNR
PVLYINVEDYSIDSSYLCSGLVGDTPRNEDSSSSSNCRDPNNERGGPGVKGWAFDSGNDVWM
GRTIRKDSREGYETFRVVGGWTTANSKSQINRQVIVDSDNLSGYSGMFSVEGKSCINRCFYV
ELIRGRPQETRVWWTSNSIIVFCGTSGTYGTGSWPDGANINFMSI
SEQ ID NO: 64:
MLPSTIQTLTLFLTSGGVLLSLYVSASLSYLLYSGILLKFSPTEITAPTMPLNCANASNVQA
VNRSATKGVTLLLPEPEWTYPRLSCPGSTFQKALLISPHRFGETKGNSAPLIIREPFIACGP
KECKHFALTHYAAQPGGYYNGTREDRNKLRHLISVKLGKIPTVENSIFHMAAWSGSACHDGR
EWTYIGVDGPDSNALLKIKYGEAYTDTYHSYANNILRTQESACNCIGGDCYLMITDGSASGI
SECRFLKIREGRIIKEIFPTGRVEHTEECTCGFASNKTIECACRDNSYTAKRPFVKLNVETD
TAEIRLMCTETYLDTPRPDDGSITGPCESHGDKGSGGIKGGFVHQRMASKIGRWYSRTMSKT
KRMGMGLYVKYDGDPWIDSGALTLSGVMVSMEEPGWYSFGFEIKDKKCDVPCIGIEMVHDGG
KKTWHSAATAIYCLMGSGQLLWDTVTGVDMAL
SEQ ID NO: 65:
MEYWKHTNHGKDVGNELETSTATHGNKLTNKITYILWTITLVLLSIVFIIVLTNSIKSEKAR
ESLLQDINNEFMEVTEKIQVASDNTNDLIQSGVNTRLLTIQSHVQNYIPISLTQQISDLRKF
ISEITIRNDNQEVPPQRITHDVGIKPLNPDDFWRCTSGLPSLMKTPKIRLMPGPGLLAMPTT
VDGCVRTPSLVINDLIYAYTSNLITRGCQDIGKSYQVLQIGIITVNSDLVPDLNPRISHTFN
INDNRKSCSLALLNTDVYQLCSTPKVDERSDYASSGIEDLVLDIVNYDGSISTTRFKNNNIS
FDQPYAALYPSVGPGIYYKGKIIFLGYGGLEHPINENAICNTTECPGKTQRDCNQASHSPWF
SDRRMVNSIIVVDKGLNSVPKLKVWSISMRQNYWGSEGRLLLLGNKIYIYTRSTSWHSKLQL
GIIDITDYSDIRIKWTWHNVLSRPGNNECPWGHSCPDGCITGVYTDAYPLNPTGSIVSSVIL
DSQKSRVNPVITYSTATERVNELAIRNETLSAGYTTTSCITHYNKGYCFHIVEINHKSLNTF
QPMLFKTEIPKSCS
SEQ ID NO: 66:
MEYWRHTNNAKNTNTEFQTETTRRNNKVTNVMMSIFGAILSTILLTVFIMILVGLIQEGNHN
KIASQQMRREFAEIERKIQQATDEIGTSIQSGINTRLLTIQSHVQNYIPLSLTQQISDLRKF
INELANKRDQQEVPIQRMTHDSGIEPLNPDKFWRCTSGNPSLASNPKIRLIPGPSLLAASTT
VNGCIRIPSFVINNLIYAYTSNLIVQGCQDIGKSYQVLQIGIITINSDLVPDLNPRVTHTFN
IDDNRKSCSLALLNTDVYQLCSTPKVDERSDYASTGIEDIVLDIITNNGLIITTRFTNDNIT
FDKPYAALYPSVGPGIYYKGKVIFLGYGGLEHAENGDVICNLTGCPGKTQRDCNQASYSPWF
SNRRMVNSIIVVNKGVDTTFNLRVWTIPMRQNYWGSEGRLLLLGNKIYIYTRSTSWHSKLQL
GTIDINNYSDIRINWTWHDALSRPGNDDCPWGHSCPDGCITGVYTDAYPLNPSGSVVSSVIL
DSRKSRENPIITYATDTRRVNELAIYNRTLPAAYTTTNCIMHYDKGYCFHIVEINHRSLNTF
QPMLFKTEIPKNCS
SEQ ID NO: 67:
MDGDRGKRDSYWSTSPSGSTTKPASGWERSSKADTWLLILSFTQWALSIATVIICIIISARQ
GYSMKEYSMTVEALNMSSREVKESLTSLIRQEVIARAVNIQSSVQTGIPVLLNKNSRDVIQM
IDKSCSRQELTQHCESTIAVHHADGIAPLEPHSFWRCPVGEPYLSSDPEISLLPGPSLLSGS
TTISGCVRLPSLSIGEAIYAYSSNLITQGCADIGKSYQVLQLGYISLNSDMFPDLNPVVSHT
YDINDNRKSCSVVATGTRGYQLCSMPTVDERTDYSSDGIEDLVLDVLDLKGRTKSHRYRNSE
VDLDHPFSALYPSVGNGIATEGSLIFLGYGGLTTPLQGDTKCRTQGCQQVSQDTCNEALKIT
WLGGKQVVSVIIQVNDYLSERPKIRVTTIPITQNYLGAEGRLLKLGDRVYIYTRSSGWHSQL
QIGVLDVSHPLTINWTPHEALSRPGNKECNWYNKCPKECISGVYTDAYPLSPDAANVATVTL
YANTSRVNPTIMYSNTTNIINMLRIKDVQLEAAYTTTSCITHFGKGYCFHIIEINQKSLNTL
QPMLFKTSIPKLCKAES
SEQ ID NO: 68:
MTSHSPFSRRRLPALLGSLPLAATGLIAAAPPAHAVPTSDGLADVTITQVNAPADGLYSVGD
VMTFNITLTNTSGEAHSYAPASTNLSGNVSKCRWRNVPAGTTKTDCTGLATHTVTAEDLKAG
GFTPQIAYEVKAVEYAGKALSTPETIKGATSPVKANSLRVESITPSSSQENYKLGDTVSYTV
RVRSVSDKTINVAATESSFDDLGRQCHWGGLKPGKGAVYNCKPLTHTITQADVDAGRWTPSI
TLTATGTDGATLQTLTATGNPINVVGDHPQATPAPAPDASTELPASMSQAQHLAANTATDNY
RIPAITTAPNGDLLISYDERPKDNGNGGSDAPNPNHIVQRRSTDGGKTWSAPTYIHQGTETG
KKVGYSDPSYVVDHQTGTIFNFHVKSYDQGWGGSRGGTDPENRGIIQAEVSTSTDNGWTWTH
RTITADITKDKPWTARFAASGQGIQIQHGPHAGRLVQQYTIRTAGGAVQAVSVYSDDHGKTW
QAGTPIGTGMDENKVVELSDGSLMLNSRASDGSGFRKVAHSTDGGQTWSEPVSDKNLPDSVD
NAQIIRAFPNAAPDDPRAKVLLLSHSPNPRPWSRDRGTISMSCDDGASWTTSKVFHEPFVGY
TTIAVQSDGSIGLLSEDAHNGADYGGIWYRNFTMNWLGEQCGQKPAEPSPAPSPTAAPSAAP
TEKPAPSAAPSAEPTQAPAPSSAFEPSAAPEPSSAPAPEPTTAPSTEPTPAPAPSSAPEQTD
GPTAAPAPETSSAPAAEPTQAPTVAPSVEPTQAPGAQPSSAPKPGATGRAPSVVNPKATGAA
TEPGTPSSSASPAPSRNAAPTPKPGMEPDEIDRPSDGTMAQPTGGASAPSAAPTQAAKAGSR
LSRTGTNALLILGLAGVAVVGGYLLLRARRSKN
SEQ ID NO: 69:
MRSNSTSAPSLVRRAATGVLTCAVSIGLLAGLGLPAQAAPTPPNSPTLPPGSFSETNLAADR
TAANFFYRIPALTYLGNDVVLAAWDGRPGSAADAPNPNSIVQRRSTDGGKTWGPVQVIAAGH
VADASGPRYGYSDPSYIYDAEANKVFAFFVYSKDQGFGGSQFGNDDADRNVISSAVIESSDA
GVTWSQPRLITSVTKPGTSKTNPAAGDVRSNFASSGEGIQLKYGPHKGRLIQQYAGDVRQAD
GSNKIQAYSVYSDDHGVTWHKGANVGDRMDENKTVELSDGRVLLNSRDNANRGYRKVAVSTD
GGATYGPVSQDTELPDPANNGAIARMFPNAAQGSADAKKLIFTNANSKTGRENVSARVSCDD
GETWPGVRTIRSGFSAYSTVTRLADGKFGVLYEGNYTDNMPFATFDDAWLNYVCAPLAVPAV
NIAPSATQEVPVTVTNQEATTLSGATATVYTPSGWSATTVPVPDVAPGASVTVTVALTAPAD
ASGPRSLNAAFTTADGRVSQFTFTATTPVAPQVGLTITGSAPARDVAANPYQAGDVLGYTLN
VKSTANVAANSVPLTGTFDSGFLPPAAPNCRYNNLAAGASYNCTTAKHTITAADMERGYFVP
EATFSITSTTTPSLTKTVQFTGAAVALRDGLISADISGARTDVGRDLATRPYAAGELVPYAF
TVKNTSPFVEQVVPTAGNFSPFLPAGAGNCRYLSLPAGQSYECATPRHAVTAEEVEQGFFVP
DTTWEVSAAGQSTRTYRINGGEVDLLVRDAALSATVVAEWKDADGDRFASAGDPVTFTYTVG
NAGNVALTGLEAPDAGISLPFLAPGDTATATREHVLTAADVAGGSLAASAFEATARNGSKEV
TATAEGQPLELKVQPAQPSKEPELTVQDLEDQTPPFDLGTAFKYRTGQKVSLAGLEYGQWYY
VYLNKTGYRLGWMFPTTGDTVEFILPPEVRNGRDDVVVLDKDGRRVSFDRLQVTPKGEKI
SEQ ID NO: 70:
MCNKNNTFEKNLDISHHPEPLILFNKDANIWNSKYFRIPNVQLLNDVTILTFSDIRYNAPDD
HAYIDIASARSTDFGKTWSYNIAMKNNRIDSTYSRAMDSTTLITNTVRIILIASSWNTNGNW
AMTTSARRSDWSVQMIYSDDNGLTWSNKIDLTKDSSKVKNQPSNTIGWLGGVGSGITMDDGT
IVMPSQISARENNENNYYSLIIYSKDNGETWTMGNKVPNSNTSENMVIELDVALIMSTRYDY
SGYRAAYISHDLGTTWEIYEPLNGKILTGKGSGCQGSFIHATTSNGKRIALISAPKNTHGEY
IRDQIAVYMIDFDDLSKGVQEICIPYPEDGNKLGGGYSCLSFKNNHLGIVYDFNGNIEYQDL
YPYYSLINKQ
SEQ ID NO: 71:
MNYKGITLILTAAMVISGGNYVLVKGSTLDSGKNNSGYEIKVNNSENLSSLGEYKDINLESS
NASNITYDLEKYKNLDEGTIVVRFNSKDSKIQSLLGISNSKTKNGYFNFYVTNSRVGFELRN
QKNEGNTQNGTENLVHMYKDVALNDGDNTVALKIEKNKGYKLELNGKMIKEVKDTNTKELNN
IENLDSAFIGKTNRYGQSNEYNFKGNIGFMNIYNEPLGDDYLLSKTGETKAKEEVLVEGAVK
TEPVDLFHPGFLNSSNYRIPALFKTKEGTLIASIDARRQGGADAPNNDIDTAVRRSEDGGKT
WDEGQIIMDYPDKSSVIDTTLIQDDETGRIFLLVTHFPSKYGFWNAGLGSGFKNIDGKEYLC
LYDSSGKEFTVRENVVYDKDGNKTEYTTNALGDLFRNGTKIDNINSSTAPLKAKGTSYINLV
YSDDDGKTWSEPQNINFQVKKDWMKFLGIAPGRGIQIKNGEHKGRIVVPVYYTNEKGKQSSA
VIYSDDSGKNWTIGESPNDNRKLENGKIINSKTLSDDAPQLTECQVVEMPNGQLKLFMRNLS
GYLNIATSFDGGATWDETVEKDTNVLEPYCQLSVINYSQKIDGKDAVIFSNPNARSRSNGTV
RIGLINQVGTYENGEPKYEFDWKYNKLVKPGYYAYSCLTELSNGNIGLLYEGTPSEEMSYIE
MNLKYLESGANK
SEQ ID NO: 72:
MKSKKIIATLVASLVISNMGGYLVKANPNVNHKAVIIEDRQAIIETAIPQSEMTASATSEEG
QDPASSAIDGNTNTMWHTKWNGSDALPQSLSVNLGSSRKVSSIAITPRTSGNNGFITKYEIH
AINNGVEALVAEGTWEENNLVKTVTFDSPIDAEEIKITAIQGVGGFASIAELNVYEIKGEVD
EIANYGNLKITKEEERVNITGDLEKFSSLEEGTIVTRFNMNDTSIQSLIGLSDGNKANNYFS
LYVSGGKVGYELRRQEGNGDFNVHHSADVTFNRGINTLALKIEKGIGAKIFLNGSLVKTVSD
PNIKFLNAINLNSGFIGKTDRANGYNEYLFRGNIDFMNIYDKPVSDNYLLRKTGETKAPLED
SLLPDDVYKTQPVELFYPGYLESRGYRIPALETTKKGTVLASIDVRNNGDHDAPNNNIDVGI
RRKEVNGEWEEGKVILDYPGKSAAIDTSLMSATIEENGIEKERIFLIVTHFPEGYGFPNTEG
GSGYREIDGKYYFILKDAQNNEYTVREDGIVYNSEGNQTDYVMKNDKTLIQNGEEVGNALLS
NSPLKAVGTAHIEMIYSDDDGKTWSEPEDLNPGLKKEWMKFFGTAPGKGIQIKNGEHKDRLI
EPIYYTNQNNFQSSAVIYSDDFGETWKLGESPIDTASVSSETVSSGTQLTECQVVEMPNGQL
KLFMRNTGSYTRIATSFDGGATWHDEVPEDTSLREPYCQLSVINYSGKINGKDAIIFSNPDA
SSRVNGSVKVGLINENGTYDNGEPRYEFDWIYNKTVKPGSFAYSCLTELPDGNLGLFYEGEG
AGRMAYTEFDLNYLKFNASEDSPSASVQSIEVLDEDLAYNSGEEVSIKVNFNQLVSIIGDRK
ITLDIGGVDVPLNMVNYEGKSSAIFKGTIPEGINQGNYEIKLKENNTLELNTVYNKVSTFNG
LDNTGINVQIGELKTTVGNSTIKVNDEVQVGSAFEAILGIEGLNGDTEVYSAEYLFEYNAEA
FILNEITSFNDSLFVKSKEVEPGKVRILVASLGNEIEKDSDLVKVNLTPKISSELEVLGLTT
ALVGAGDGNTHDLELS SKEVKINEEASGEIWNPVQNFEIPEINKKNVKLTWNAPITTEGLE
GYVIYKDGKKLSEVPAESTEFVVSKLNRHTIYNFKVAAKYSNGELSAKESKTIRTAR
SEQ ID NO: 73:
MYSLIKKSISTIALSTLAITSLPTYSVSSQTTEEYGARKYFINNNIENIKNIENKSFDLIQN
LNTKILEKENIETLSGTVVDFTKEATSNSTIPNGLIIEKSNINITAGKGYDLSSEMGSEYVK
ALEKGTIIVSYKSTSNNSIQSLVSIGNNTSGNRDRHFHIYITNTGEVGMELRNTDSVLKYTL
GRPAAVRSIYKNNLVFNTIAFKADPSNKQYKLFANGELLATLNTDVYKFINDITGVNNVMLG
GTVRDGVIAYPFGGTIGNVKIYNEILTDEALKAETGATTYGKNIFYAGDSTKSNYFRIPSLL
SLRSGTVVSAADARYGGTHDSKSNIDIAFSKSLDGGIIWKNPTIPLQFNDYVARNIDWPRDS
IGKNVQIQGSASFIDPVLLEDKETKRLFIFADAMPAGIGSSNASTGSGYKDIAGKKYMKLRW
HQDGSSTYNYSIRENGVIYNDVTNLPTEYKIDGDYNLYKNGIALLYKQYDYNFSGTTLLETA
TNIDVNMNVFYKDSLFKVFPTTYLDMKYSDDEGETWSNLNIVSSFKPENSKFLVLGPGVGKQ
ISKGQYKGRLIVPLYSSSYAELGFMYSDDHGQTWNYVAADNRNTGTTAEAQIVEMPDGSLKS
YLRTGSGVIAEVTSINGGETWSDRVTVPNMHTTSYGTQLSVINYAGLIDGKEAIILSAPDSS
SARRNGKIWIGLISDTGASGINKYSIEWKYCYSVDSSNMGYSYSCLTELPNGDIGLLYEKYD
SWSRNELHLKNILKYETFSINELKQPISN
SEQ ID NO: 74:
MYSSNRTYSRAILGLSAVLTLSFTSLVAPVNAEEPETVVPATAELEGEVAATLPSAETGLLD
AAPPKPVARGAAGDLQLPAVNEKEVFEEGRVIRAPEPDQSRCYRIPALVTAKNGDLLLAFDN
RYGGGDGAKTWCRDAPYENMKRINRQNMQTDIQLYRSVDNGQSFEDFGYIAQGTADVRELSY
TDPALVTDRTTGKIFAFFVRAYDYRVGQSSAGFNEGDVEAEIQKRDVQDTVVVESLDGGQTW
GNMRLLSALTAKVSSISTGDTIFDGRGRFVTSGAGIQLQYGEHAGRLIVPISVDIDPKDSAK
FINLAIYSDDHGQTWQAGIGTAGGAGFSGDVSKIVELSDGRLMMSSKDNDKPRWVSYSEDQG
ENWSTPKRKIIAPPQHPEKHNTGINVGLIRAYPNAPENSAAARVLLYSAPIDQRYSHKHTED
GRNNGWVMGSCDDGKTWSFGRQIEKNRFQYSSMTVMSDGNIGMVYESGDFSTGMNLKFAKFN
MAWLGADCHSNEALGLTGDIDKEIVEAQEKAAEATKEAQEAAEKVQKLTEELAAARKENDEL
KNQVKGFKEAVGDLANEAEDLADKVFKLETAVTEAKEKATVAEKAASDAVTQLQKAESIAEE
QKAKAESAAAEAQALREKLERLEGSILTVKENPEAEEIADLSSTAKDAADAARRAATDANGA
LSGQKQDEEKPAMGLMGILKVLAGIIPLVAIIATIFQTFRLPFNIPGMR
SEQ ID NO: 75:
MTANPYLRRLPRRRAVSFLLAPALAAATVAGASPAQAIAGAPVPPGGEPLYTEQDLAVNGRE
GFPNYRIPALTVTPDGDLLASYDGRPTGIDAPGPNSILQRRSTDGGRTWGEQQVVSAGQTTA
PIKGFSDPSYLVDRETGTIFNFHVYSQRQGFAGSRPGTDPADPNVLHANVATSTDGGLTWSH
RTITADITPDPGWRSRFAASGEGIQLRYGPHAGRLIQQYTIINAAGAFQAVSVYSDDHGRTW
RAGEAVGVGMDENKTVELSDGRVLLNSRDSARSGYRKVAVSTDGGHSYGPVTIDRDLPDPTN
NASIIRAFPDAPAGSARAKVLLFSNAASQTSRSQGTIRMSCDDGQTWPVSKVFQPGSMSYST
LTALPDGTYGLLYEPGTGIRYANFNLAWLGGICAPFTIPDVALEPGQQVTVPVAVTNQSGIA
VPKPSLQLDASPDWQVQGSVEPLMPGRQAKGQVTITVPAGTTPGRYRVGATLRTSAGNASTT
FTVTVGLLDQARMSIADVDSEETAREDGRASNVIDGNPSTFWHTEWSRADAPGYPHRISLDL
GGTHTISGLQYTRRQNSANEQVADYEIYTSLNGTTWDGPVASGRFTTSLAPQRAVFPARDAR
YIRLVALSEQTGHKYAAVAELEVEGQR
SEQ ID NO: 76:
MKKPVFLLSLLALSTSMAVHGNSFWKADLHENLTNVTKRVGVDGFTVNKEGQPWPGIGPNGE
AGGTVTLPYSRIPAMT1TDDNKMVVMFDLRWKTASDONRIDPGAAISEDGGHSWKRITAWNE
NDSKISLRRAMDPTLLFNSFDGSLYVMHGTWAAGTQNWYRDRLSYFNQNIWAATIYKSTDGG
LSWQKNTEFSNTVNRDVFMKVQKGVGNPTIGFLGGVGTGIVMKDGTLVFPIQTAHREGIATT
IMYSKDNGRTWDMPTINNALAPNPSSLENMVFEIDNKLVMTGREDNGKKTRWAYYTEDLGQT
WHVYEPVNGESATTAAPSQGSSIYVTLPIGKRFLLLSKPNGNGNDRYAKGNLALWMLNAKNP
NHKHQVPIIKPGSGNSAGAGYSPLAYKKGNLFIAFENNGDITVKNLSAHMQAIEKKATEWGL
TDEIATEVEKINSLEHLNKGQKETLSAKMRRANDNAVAESNVLNREMHELKDEATSLEQKSV
AMRKALPSKMKQFKRDLGEVRDLTQLTNETYLNYLGIQGLMAMLNGSFLALNTPLDFSKYIK
QGEKLNSYDTDILYSTYNKVFVEYDSVIKNSQHRPTIALGLNTRLTDQTQAGVFYEYENKKQ
KVDAFGVRAQYTKGDNVLAPFLRYRTVKHDDVIDRNHNVDLYINYAKNVNIDPHLTLSPFVG
AYTSLSSRTLLDEDVAVNKRLVMAGDVGLDIRYRLADISVSIRPNIAFIKDGFTFSQAIYRD
NPF
SEQ ID NO: 77:
MMKKFNPSVLALSISSLLLTSTLTFGQIQQQDKAHFGVKEHQESLLFHQSLVKQGSDNVPIW
RIPSLLRTKDGVLIAAADKRWQHRGDWGDIDTAIRISHDDGKTWGNITTILDLPSQNGEKSP
IRDDAPTFNPWAHRNNSSVATYRNSAFLIDAQMVQDKRNGRIFLAVDMFPESTGLSGPSDNG
VTEFGSGYVNIDGKQYLRLNKKEGYTSKQVVTLRENGIVFNEKNEKTGYRWINGDPKKNFKD
LGDVYDQDNNKLGNIYLKQTERNATVPFIAPNTSYFWLTHSDDNGKTWSSPIDLTSQVKKDW
MRFFGTGPGVGIQTKKGNLLFPIYYINRHGKQSSALIISKDGGKTWDLGQSPNDTRTELYGK
NSETLNSNSSGHELTESQLVELQNGDLKLFMRNTSGRVMMSTSKDGGYSWIETKQVPELNHG
YSQLSVIKYSKKINGKEYIVFSGQSVSGNSGDKLRRDGKLFLGEVQDNGDINWDTTNLVRNI
KSSGLAKQGSEVYPNGYVYSSMAELGDGSIGLAYENTTDYTTIMYLPIEMQEFFWKAGKIFS
DVRQKEPLVFTYDGTETLEKIGDGIAIKRGEGESQSGINVSEGLLVLDQQTKDGKNKAFTQL
TLNNSGVAQVNSTQNIDRFVVNNGATGYLQFTVTDTHSPRLKINQDVTAHGQIVAVQVNLQK
KLKPNDKGYYHAQGEELIAFKDNGQVKWRLVNDELKDGMYVYTLASVAKPSGLRTPSQPHSL
YLTNKLITADGKAVSTVAPLKAPLTVNARPQVNPVLASYLTANLALNKMSEQLQQSFMHETR
LLQEKDRSIFVKYLNGKQKYGSNLSFYDYGYDFNASYSGVMLGGKVWQSERGNHALYTALNK
TSYKVTPKAVDGETKAKYQSWGGSINWHSNLPHNLIVDLSTGYQKHKGDIEHAGHVKGYTFN
IGADLGYRYQWMKNAFITPMVGLHYLYASLSDVNDQANKALLKYNNFNALKTNLGVDVNYRI
GKFEVKGLLSYDMYQQKTRQLYVDDVAYKQGKLADTLHLNTQFVAHLTPRFAFSTEVGFQHA
RNKGQSSFAVGAHYQF
SEQ ID NO: 78:
MNTYFDIPHRLVGKALYESYYDHFGQMDILSDGSLYLIYRRATEHVGGSDGRVVFSKLEGGI
WSAPTIVAQAGGQDFRDVAGGTMPSGRIVAASTVYETGEVKVYVSDDSGVTWVHKFTLARGG
ADYNFAHGKSFQVGARYVIPLYAATGVNYELKWLESSDGGETWGEGSTIYSGNTPYNETSYL
PVGDGVILAVARVGSGAGGALRQFISLDDGGTWTDQGNVTAQNGDSTDILVAPSLSYIYSEG
GTPHVVLLYTNRTTHFCYYRTILLAKAVAGSSGWTERVPVYSAPAASGYTSQVVLGGRRILG
NLFRETSSTTSGAYQFEVYLGGVPDFESDWFSVSSNSLYTLSHGLQRSPRRVVVEFARSSSP
STWNIVMPSYFNDGGHKGSGAQVEVGSLNIRLGTGAAVWGTGYFGGIDNSATTRFATGYYRV
RAWI
SEQ ID NO: 79:
MTRHLLNCRILYMHPPLDMHTHPFIKEGKSMTVEKSVVFKAEGEHFTDQKGNTIVGSGSGGT
TKYFRIPAMCTTSKGTIVVFADARHNTASDQSFIDTAAARSTDGGKTWNKKIAIYNDRVNSK
LSRVMDPTCIVANIQGRETILVMVGKWNNNDKTWGAYRDKAPDTDWDLVLYKSTDDGVTFSK
VETNIHDIVTKNGTISAMLGGVGSGLQLNDGKLVFPVQMVRTKNITTVLNTSFIYSTDGITW
SLPSGYCEGFGSENNIIEFNASLVNNIRNSGLRRSFETKDFGKTWTEFPPMDKKVDNRNHGV
QGSTITIPSGNKLVAAHSSAQNKNNDYTRSDISLYAHNLYSGEVKLIDDFYPKVGNASGAGY
SCLSYRKNVDKETLYVVYEANGSIEFQDLSRHLPVIKSYN
SEQ ID NO: 80:
MNKRGLYSKLGISVVGISLLMGVPTLIHANELNYGQLSISPIFQGGSYQLNNKSIDISSLLL
DKLSGESQTVVMKFKADKPNSLQALFGLSNSKAGFKNNYFSIFMRDSGEIGVEIRDAQEGIN
YLFSRPASLWGKHKGQAVENTLVFVSDSKDKTYTMYVNGIEVFSETVDTFLPISNINGIDKA
TLGAVNREGKEHYLAKGSIGEISLFNKAISDQEVSNIPLSNPFQLIFQSGDSTQANYFRIPT
LYTLSSGRVLSSIDARYGGTHDSKSKINIATSYSDDNGKTWSEPIFAMKFNDYEEQLVYWPR
DNKLKNSQISGSASFIDSSIVEDKKSGKTILLADVMPAGIGNNNANKADSGFKEINGHYYLK
LKKNGDNDFRYTVRENGVVYDETTNKPTNYTINDKYEVLEGGKSLTVEQYSVDFDSGSLRER
HNGKQVPMNVFYKDSLFKVTPTNYIAMTTSQNRGESWEQFKLLPPFLGEKHNGTYLCPGQGL
ALKSSNRLIFATYTSGELTYLISDDSGQTWKKSSASIPFKNATAEAQMVELRDGVIRTFFRT
TTGKIAYMTSRDSGETWSKVSYIDGIQQTSYGTQVSAIKYSQLIDGKEAVILSTPNSRSGRK
GGQLVVGLVNKEDDSIDWRYHYDIDLPSYGYAYSAITELPNHHIGVLFEKYDSWSRNELHLS
NVVQYIDLEINDLTK
SEQ ID NO: 81:
MKKFFWIIGLFISMQMTRAADSVYVQNPQIPILIDRTDNVLFRIRIPDATKGDVLNRLTIRF
GNEDKLSEVKAVRLFYAGTEAATKGRSRFAPVTYVSSHNIRNTRSANPSYSVRQDEVTTAAN
TLTLKTRQPMVKGINYFWVSVEMDRNTSLLSKLTPTVTEAVINDKPAVIAGEQAAVRRMGIG
VRHAGDDGSASFRIPGLVTTNEGTLLGVYDVRYNNSVDLQEHVDVGLSRSTDKGQTWEPMRI
AMSFGETDGLPSGQNGVGDPSILVDERTNTVWVVAAWTHGMGNARAWTNSMPGMTPDETAQL
MMVKSTDDGRTWSEPINITSQVKNPSWCFLLQGPGRGITMRDGTLVFPIQFIDSLRVPHAGI
MYSKDRGETWHIHQPARTNTTEAQVAEVEPGVLMLNMRDNRGGSRAVSITRDLGKSWTEHSS
NRSALPESICMASLISVKAKDNIIGKDLLLFSNPNTTEGRHHITIKASLDGGVTWLPAHQVL
LDEEDGWGYSCLSMIDRETVGIFYESSVAHMTFQAVKIKDLIR
SEQ ID NO: 82:
MSIKMTSQRRRASIHKETDSNIKGVDMRFKNVKKTALMLAMFGMATSSNAALFDYNATGDTE
FDSPAKQGWMQDNTNNGSGVLTNADGMPAWLVQGIGGRAQWTYSLSTNQHAQASSFGWRMTT
EMKVLSGGMITNYYANGTQRVLPIISLDSSGNLVVEFEGQTGRTVLATGTAATEYHKFELVF
LPGSNPSASFYFDGKLIRDNIQPTASKQNMIVWGNGSSNTDGVAAYRDIKFEIQGDVIFRGP
DRIPSIVASSVTPGVVTAFAEKRVGGGDPGALSNTNDIITRTSRDGGITWDTELNLTEQINV
SDEFDFSDPRPIYDPSSNTVLVSYARWPTDAAQNGDRIKPWMPNGIFYSVYDVASGNWQAPI
DVTDQVKERSFQIAGWGGSELYRRNTSLNSQQDWQSNAKIRIVDGAANQIQVADGSRKYVVT
LSIDESGGLVANLNGVSAPIILQSEHAKVHSFHDYELQYSALNHTTTLFVDGQQITTWAGEV
SQENNIQFGNADAQIDGRLHVQKIVLTQQGHNLVEFDAFYLAQQTPEVEKDLEKLGWTKIKT
GNTMSLYGNASVNPGPGHGITLTRQQNISGSQNGRLIYPAIVLDRFFLNVMSIYSDDGGSNW
QTGSTLPIPFRWKSSSILETLEPSEADMVELQNGDLLLTARLDFNQIVNGVNYSPRQQFLSK
DGGITWSLLEANNANVFSNISTGTVDASITRFEQSDGSHFLLFTNPQGNPAGTNGRQNLGLW
FSFDEGVTWKGPIQLVNGASAYSDIYQLDSENAIVIVETDNSNMRILRMPITLLKQKLTLSQ
N
SEQ ID NO: 83
MYSSNRTYSRAILGLSAVLTLSFTSLVAPVNAEEPETVVPATAELEGEVAATLPSAETGLLD
AAPPKPVARGAAGDLQLPAVNEKEVFEEGRVIRAPEPDQSRCYRIPALVTAKNGDLLLAFDN
RYGGGDGAKTWCRDAPYENMKRINRQNMQTDIQLYRSVDNGQSFEDFGYIAQGTADVRELSY
TDPALVTDRTTGKIFAFFVRAYDYRVGQSSAGFNEGDVEAEIQKRDVQDTVVVESLDGGQTW
GNMRLLSALTAKVSSISTGDTIFDGRGRFVTSGAGIQLQYGEHAGRLIVPISVDIDPKDSAK
FINLAIYSDDHGQTWQAGIGTAGGAGFSGDVSKIVELSDGRLMMSSKDNDKPRWVSYSEDQG
ENWSTPKRKIIAPPQHPEKHNTGINVGLIRAYPNAPENSAAARVLLYSAPIDQRYSHKHTED
GRNNGWVMGSCDDGKTWSFGRQIEKNRFQYSSMTVMSDGNIGMVYESGDFSTGMNLKFAKFN
MAWLGADCHSNEALGLTGDIDKEIVEAQEKAAEATKEAQEAAEKVQKLTEELAAARKENDEL
KNQVKGFKEAVGDLANEAEDLADKVFKLETAVTEAKEKATVAEKAASDAVTQLQKAESIAEE
QKAKAESAAAEAQALREKLERLEGSILTVKENPEAEEIADLSSTAKDAADAARRAATDANGA
LSGQKQDEEKPAMGLMGILKVLAGIIPLVAIIATIFQTFRLPFNIPGMR
SEQ ID NO: 84
MSRRKAVFSALGAAALIGAALPTIPTAQAQTPTGYGFDATASIGEEPEFSTQQLADGGTLGF
DCYRIPSLGVAPNGNVLASWDGRPNNCSDAPQPNSIVGKVSTDNGATWGEQHDISAGITAEP
KTGYSDPSIVVDWERGDVFNFHVKSFDAGYFTSQPGTDPDDRNVAHVAYAKSSDNGSTWVAD
TVITDQVVADDTWDSRFATSGNGIQLQYGAYKGRLVQPSVTRMTNGRVAAVAMLSDDHGTTW
YPSAPWGNSMDENKIVELSDGTLMNNSRSSGADTYRKVSYSTDGGVTWTEPTLDTQLPDPRN
NASLIRVFPTAPEGSAQAKVLLFSNTATTSGRTNGTVRMSCDDGQTWPVSKVFEPGAIQYTS
MATLPNGDIGMLWENSGSNIDIFYSQFNLSWLEAGCIGVDADETPVTAGETTTMNVTLTNPF
ANAIFDRAVSLELPEGWQAEDVRVSIPSGESVTIPVQVTAPLVADNGELPVEVSILDGADRY
TGRLNLTVQGGQEPASTSVKVSIPNLKDTYVAGEKISINFAVNNPFDVTVNSVPSLGEGENW
MPANLRGFDPEQGAPNCRYRNLGANQSYNCTTTTYEVSDSDVERGYVDIPTVWTFTNSAGET
VWSKNVDVPRIELNGTQDAVTDAIVTVDPINPVHSNGQSQTVEVQANVTSEGDLPAGSKVAF
YLDSSPIDAAAVDAEGHASISIDVDNIASEQPERTFEVRARLVVPEDAPRSIARDALARFTV
LPEQVQQNSLVIMNHPDVVSDGQTKTIVIAVKATAHDGSPVAIGTLITFRVNGIERDVVPTN
AQGTAKLQLDLKPVNTEDEEYEVTVEAELDELTAQTTFKVLAGEEEEPTSTEEQPSETEQPS
EPEEEPTAPTGSSNGGSFAALLALLAALGGIVGAVLGLLKL
SEQ ID NO: 85
MNYKGITLILTAAMVISGGNYVLVKGSTLDSGKNNSGYEIKVNNSESLSSLGEYKDINLESS
NASNITYDLEKYKNLDEGTIVVRFNSKDSKIQSLLGISNSKTKNGYFNFYVTNSRVGFELRN
QKNEGNTQSGTENLVHMYKDVALNDGDNTVALKIEKNKGYKLFLNGKIIKEVKDTNTKFLNN
IENLDSAFIGKTNRYGQSNEYNFKGNIGFMNIYNEPLGDDYLLSKTGETKAKEEVLVEGAVK
TEPVDLFHPGFLNSSNYRIPALFKTKEGTLIASIDARRHGGADAPNNDIDTAVRRSEDGGKT
WDEGQIIMDYPDKSSVIDTTLIQDDETGRIFLLVTHFPSKYGFWNAGLGSGFKNIDGKEYLC
LYDSSGKEFTVRENVVYDKDGNKTEYTTNALGDLFKNGTKIDNINSSTAPLKAKGTSYINLV
YSDDDGKTWSEPQNINFQVKKDVVMKFLGIAPGRGIQIKNGEHKGRIWPVYYTNEKGKQSSA
VIYSDDSGKNWTIGESPNDNRKLENGKIINSKTLSDDAPQLTECQVVEMPNGQLKLFMRNLS
GYLNIATSFDGGDTWDETVEKDTNVLEPYCQLSVINYSQKVDGKDAVIFSNPNSRSRSNGTV
RIGLINQVGTYENGEPKYEFDWKYNKLVKPGYYAYSCLTELSNGNIGLLYEGTPSEEMSYTE
MNLKYLESGANK
SEQ ID NO: 86:
MKKAVILFSLFCFLCAIPVVQAADTIFVRETRIPILIERQDNVLFYLRLDAKESQTLNDVVL
NLGEGVNLSEIQSIKLYYGGTEALQDSGKKRFAPVGYISSNTPGKTLAANPSYSIKKSEVTN
PGNQVVLKGDQKLFPGINYFWISLQMKPGTSLTSKVTADIASITLDGKKALLDVVSENGIEH
RMGVGVRHAGADNSAAFRIPGLVTTNKGTLLGVYDVRYNSSVDLQEHVDVGLSRSTDGGKTW
EKMRLPLAFGEFGGLPAGQNGVGDPSILVDTKTNNVWVVAAWTHGMGNQRAWWSSHPGMDMN
HTAQLVLAKSTDDGKTWSAPINITEQVKDPSWYFLLQGPGRGITMSDGTLVFPTQFIDSTRV
PNAGIMYSKDGGKNWKMHNYARTNTTEAQVAEVEPGVLMLNMRDNRGGSRAVAITKDLGKTW
TEHESSRKALPESVCMASLISVKAKDNVLGKDLLIFSNPNTTKGRYNTTIKISLDGGVTWSP
EHQLLLDEGNNWGYSCLSMIDKETIGILYESSVAHMTFQAVKLKDIIK
SEQ ID NO: 87:
GEPLYTEQDLAVNGREGFPNYRIPALTVTPDGDLLASYDGRPTGIDAPGPNSILQRRSTDGG
RTWGEQQVVSAGQTTAPIKGFSDPSYLVDRETGTIFNFHVYSQRQGFAGSRPGTDPADPNVL
HANVATSTDGGLTWSHRTITADITPDPGWRSRFAASGEGIQLRYGPHAGRLIQQYTIINAAG
AFQAVSVYSDDHGRTWRAGEAVGVGMDANKTVELSDGRVLLNSRDSARSGYRKVAVSTDGGH
SYGPVTIDRDLPDPTNNASIIRAFPDAPAGSARAKVLLFSNAASQTSRSQGTIRMSCDDGQT
WPVSKVFQPGSMSYSTLTALPDGTYGLLYEPGTGIRYANFNLAWLGGICAPFTIPDVALEPG
QQVTVPVAVTNQSGIAVPKPSLQLDASPDWQVQGSVEPLMPGRQAKGQVTITVPAGTTPGRY
RVGATLRTSAGNASTTFTVTVGLLDQARMSIADVDSEETAREDGRASNVIDGNPSTFWHTEW
SRADAPGYPHRISLDLGGTHTISGLQYTRRQNSANEQVADYEIYTSLNGTTWDGPVASGRFT
TSLAPQRAVFPARDARYIRLVALSEQTGHKYAAVAELEVEGQR
SEQ ID NO: 88:
MSYFRNRDIDIERNSMNRSVQERKCRYSIRKLSVGAVSMIVGAVVFGTSPVLAQEGASEQPL
ANETQLSGESSTLTDTEKSQPSSETELSGNKQEQERKDKQEEKIPRDYYARDLENVETVIEK
EDVETNASNGQRVDLSSELDKLKKLENATVHMEFKPDAKAPAFYNLFSVSSATKKDEYFTMA
VYNNTATLEGRGSDGKQFYNNYNDAPLKVKPGQWNSVTFTVEKPTAELPKGRVRLYVNGVLS
RTSLRSGNFIKDMPDVTHVQIGATKRANNTVWGSNLQIRNLTVYNRALTPEEVQKRSQLFKR
SDLEKKLPEGAALTEKTDIFESGRNGKPNKDGIKSYRIPALLKTDKGTLIAGADERRLHSSD
WGDIGMVIRRSEDNGKTWGDRVTITNLRDNPKASDPSIGSPVNIDMVLVQDPETKRIFSIYD
MFPEGKGIFGMSSQKEEAYKKIDGKTYQILYREGEKGAYTIRENGTVYTPDGKATDYRVVVD
PVKPAYSDKGDLYKGNQLLGNIYFTTNKTSPFRIAKDSYLWMSYSDDDGKTWSAPQDITPMV
KADWMKFLGVGPGTGIVLRNGPHKGRILIPVYTTNNVSHLNGSQSSRIIYSDDHGKTWHAGE
AVNDNRQVDGQKIHSSTMNNRRAQNTESTVVQLNNGDVKLFMRGLTGDLQVATSKDGGVTWE
KDIKRYPQVKDVYVQMSAIHTMHEGKEYIILSNAGGPKRENGMVHLARVEENGELTWLKHNP
IQKGEFAYNSLQELGNGEYGILYEHTEKGQNAYTLSFRKFNWDFLSKDLISPTEAKVKRTRE
MGKGVIGLEFDSEVLVNKAPTLQLANGKTARFMTQYDTKTLLFTVDSEDMGQKVTGLAEGAI
ESMHNLPVSVAGTKLSNGMNGSEAAVHEVPEYTGPLGTSGEEPAPTVEKPEYTGPLGTSGEE
PAPTVEKPEYTGPLGTAGEEAAPTVEKPEFTGGVNGTEPAVHEIAEYKGSDSLVTLTTKEDY
TYKAPLAQQALPETGNKESDLLASLGLTAFFLGLFTLGKKREQ
SEQ ID NO: 89:
MPPRTRRPFWLALATSCALAVSSPFPAHARPGDRAPAFGEQVLFDAARDPGGYACFRIPAIV
RTTDGTLLAFAEGRVLDCADDGDIDIVLRRSLDGGRTWGPLRVVNDGGGDTHGNPAPVVDRA
TGRVLLLETYNAGRTDSADCAVPCARVPHVQHSDDGGRTWSAPRDLSPEILPPDWNSWYATG
PVHGVQLTGGAHPGRLVVGVNAETWDGERSEMGVPPAGGWGRVTANHAALVVSDDGGEHWRT
GATDTWPVAADGTFRQKPSELTLTERADGALLVSGREENGTDPGHRTQALSRDGGDSFAAPF
RALPDLYAPQVQGAVLRLGNRILLSAPADPDRRRTMTVRSSRDGGATWDSADRGTVVTRDWA
GYSDLVTVDDDTVGLLYEGGKTDARDEIRFARLTADRLAPPRGPDPTTPDLAANAAPAAVLG
GAAPTTDGAVGGALAFDGADDAVRLPYDGRLALGEGDFTASLWFRYSAADGEQPLLWMGGIG
TTQPQVWLRAEPDAGRVQGLITARDGATAPRSAWVRTDRAYDDGRWHRLTLRRGGGRLTLFV
DGSAAADAADVPGSVSRNSPFGVHIGERMDGRARFTGAVDDVQVWNSALTDTEIAAGVPPAA
GRSTVLHLPLDRVDEAAADTGGSTDTGG
SEQ ID NO: 90:
MQRRVTVAMLSAALLVATTAGTAHGAPAAAPGELTSQDIATQGVGSPHYRIPALTTSVRGTL
IAAYDTRPTLGDLPGNLGVVVRRSTDGGATWESQQVVRKEAAPKGFGDPSLLVDRTTGRIFV
FYAGSVNQGFFGSGTGNDESDPNILQADYSYSDDDGVTWTHRRITKQIKNPAWAGMFAASGE
GIQVRHGAYEGRLIQQYAIRNNGANYAVSAYSDDHGATWKTGTPVGPGGDENKTVELSDGRI
MLNNRSAPYRTVAYSSDGGVTYTPFVQDTDLPDPANNGSVIRYAPDVPASHPQASWLLFSNT
DSTARKNLTVKMSCDNGRTWPIRKVVDPGSAAYSTLTRLPDGRLGLLYERADYRHITYSSFD
LKWLGGTCADITITPPATLRAGTTAEVTVRVVNRMDVTRSAGTLDLAVPAGWSTRQVAFPAV
RPGQGANIKVPVTIPAGATGDARLTVTYKADGKQASGSRSVTVTP
SEQ ID NO: 91:
MTLTTKLSALTTAGIMVVIGVPMVTQSAMASGRAPAPVAATTQPKLVTGDITSTDQSGTNLF
FGKKIVRNARGAIMKVDRTWPAAVPAPLPDVRADSSTRMLLGPVVDLAVNEHPEGVFYRIPA
LATASNGDLLASYDLRPGSAGDAPNPNSIVQRRSRDNGRTWGPQTVIHAGTPGRRKVGYSDP
SYLVDPATGRILNFHVKSYDRGFATSEVGTDPDDRHVLHAEVSTSTDNGHTWTHRDITREIT
PDPTTRTRFVASGQGIALLHGPHAGRLIAQMTVRNSVGQQAQSIYSDDHGITWHAGNPVGRM
MDENKVVELSDGTLMLNSRDAARSGRRKVAYSQDGGLTWGPVKLVDDLIDPTNNAQIIRAYP
NARAGSAKARILLFTNARNATERVNGTLSVSCDDGRTWVSHQTYMPGEVGYTTAAVQSDGAL
GVLWERDGIRYSTIPMGWLNSVCPLAPSGRPTSGKPTSGTSLPPTATPSGSLHGGASSRPTS
LPHTGD
SEQ ID NO: 92:
MGRIGKKAMAIALVSAVMVTPLNVCATVENQEQQQVTQGAEDIAVIDDAQETVAADEAQADE
AAAITVEGRETAEESSASIPEGILMEKNNVDIAEGQGYSLDQEAGAKYVKAMTQGTIILSYK
STSENGIQSLFSVGNSTAGNQDRHFHIYITNSGGIGIELRNTDGVFNYTLDRPASVRALYKG
ERVFNTVALKADAANKQCRLFANGELLATLDKDAFKFISDITGVDNVTLGGTKRQGKIAYPF
GGTIGDIKVYSNALSDEELIQATGVTTYGENIFYAGDVTESNYFRIPSLLTLSTGTVISAAD
ARYGGTHDSKSKINIAFAKSTDGGNTWSEPTLPLKFDDYIAKNIDWPRDSVGKNVQIQGSAS
YIDPVLLEDKLTKRIFLFADLMPAGIGSSNASVGSGFKEVNGKKYLKLRWHKDAGRAYDYTI
REKGVIYNDATNQPTEFRVDGEYNLYQHDTNLTCKQYDYNFSGNNLIESKTDVDVNMNIFYK
NSVFKAFPTNYLAMRYSDDEGASWSDLDIVSSFKPEVSKFLVVGPGIGKQISTGENAGRLLV
PLYSKSSAELGFMYSDDHGDNWTYVEADNLTGGATAEAQIVEMPDGSLKTYLRTGSNCIAEV
TSIDGGETWSDRVPLQGISTTSYGTQLSVINYSQPIDGKPAIILSSPNATNGRKNGKIWIGL
VNDTGNTGIDKYSVEWKYSYAVDTPQMGYSYSCLAELPDGQVGLLYEKYDSWSRNELHLKDI
LKFEKYSISELTGQASGN
SEQ ID NO: 93:
MLAPGSSRVELFKRQSSKVPFEKDGKVTERVVHSFRLPALVNVDGVMVAIADARYETSNDNS
LIDTVAKYSVDDGETWETQIAIKNSRASSVSRVVDPTVIVKGNKLYVLVGSYNSSRSYWTSH
GDARDWDILLAVGEVTKSTAGGKITASIKWGSPVSLKEFFPAEMEGMHTNQFLGGAGVAIVA
SNGNLVYPVQVTNKKKQVFSKIFYSEDDGKTWKFGEGRSAFGCSEAVALEWEGKLIINTRVD
YRRRLVYESSDMGNTWLEAVGTLSRVWGPSPKSNQPGSQSSFTAVTIEGMRVMLFTHPLNFK
GRWLRDRLNLWLTDNQRIYNVGQVSIGDENSAHSSVLYKDDKLYCLHEINSNEVYSLVFARL
VGELRIIKSVLQSWKNWDSHLSSICTPADPAASSSERGCGPAVTTVGLVGFLSHSATKTEWE
DAYRCVNASTANAERVPNGLKFAGVGGGALWPVSQQGQNQRYRFANHAFTVVASVTIHEVPS
VASPLLGASLDSSGGKKLLGLSYDEKHQWQPIYGSTPVTPTGSWETGKRYHVVLTMANKIGS
VYIDGEPLQGSGQTVVPDERTPDISHFYVGGYKRSDMPTISHVTVNNVLLYNRQLNAEEIRT
LFLSQDLIGTEAHMDSSSDTSA
SEQ ID NO: 94:
MRLSLNKLMGLGLLCALGLSIPSVLGKESFEQARRGKFTTLSTKYGLMSCRNGVAEIGGGGK
SGEASLRMFGGQDAELKLDLKDTPSREVRLSAWAERWTGQAPFEFSIVAIGPNGEKKIYDGK
DIRTGGFHTKIETSVPAGTRSLVFRLTSPENKGMKLDDLFLVPCIPMKVNPQVEMSSSAYPV
MVRIPCSPVLSLNVRTDGCLNPQFLTAVNLDFTGTTKLSDIESVAVIRGEEAPIIHHGEEPF
PKDSSQVLGTVKLAGSARPQISVKGKMELEPGDNYLWACVTMKEGATLDGRVVVRPASVVAD
NKPVRVANAAPVVQRIGVAVVRHGDFKSKFYRIPGLARSRKGTLLAVYDIRYNHSGDLPANI
DVGVSRSTDGGRTWSDVKIAIDDSKIAPSLGATRGVGDPAILVDEKTGRIWVAAIWSHRHSI
WGSKSGDNSPEACGQLVLAYSDNDGLTWSRPINITEQTKNKDWRILFNGPGNGICMKDGTLV
FAAQYWDGKGVPWSTIVYSKDRGKTWHCGTGVNQQTTEAQVIELEDGSVMINARCNWGGSRI
VGVTKDLGQTWEKHPTNRTAQLKEPVCQGSLLAVDGVPGAGRVVLFSNPNTTSGRSHMTLKA
STNDAGSWPEDKWLLYDARKGWGYSCLAPVDKNHVGVLYESQGALNFLKIPYKDVLNAKNAR
SEQ ID NO: 95:
MKKAVILFSLFCFLCAIPVVQAADTIFVRETRIPILIERQDNVLFYLRLDAKESQTLNDVVL
NLGEGVNLSEIQSIKLYYGGTEALQDSGKKRFAPVGYISSNTPGKTLAANPSYSIKKSEVTN
PGNQVVLKGDQKLFPGINYFWISLQMKPGTSLTSKVTADIASITLDGKKALLDVVSENGIEH
RMGVGVRHAGDDNSAAFRIPGLVTTNKGTLLGVYDVRYNSSVDLQEHVDVGLSRSTDGGKTW
EKMRLPLAFGEFGGLPAGQNGVGDPSILVDTKTNNVWVVAAWTHGMGNQRAWWSSHPGMDMN
HTAQLVLAKSTDDGKTWSAPINITEQVKDPSWYFLLQGPGRGITMSDGTLVFPTQFIDSTRV
PNAGIMYSKDGGKNWKMHNYARTNTTEAQVAEVEPGVLMLNMRDNRGGSRAVAITKDLGKTW
TEHESSRKALPESVCMASLISVKAKDNVLGKDLLIFSNPNTTKGRYNTTIKISLDGGVTWSP
EHQLLLDEGNNWGYSCLSMIDKETIGILYESSVAHMTFQAVKLKDIIK
SEQ ID NO: 96:
MKRNHYLFTLILLLGCSIFVKASDTVFVHQTQIPILIERQDNVLFYFRLDAKESRMMDEIVL
DFGKSVNLSDVQAVKLYYGGTEALQDKGKKRFAPVDYISSHRPGNTLAAIPSYSIKCAEALQ
PSAKVVLKSHYKLFPGINFFWISLQMKPETSLFTKISSELQSVKIDGKEAICEERSPKDIIH
RMAVGVRHAGDDGSASFRIPGLVTSNKGTLLGVYDVRYNSSVDLQEYVDVGLSRSTDGGKTW
EKMRLPLSFGEYDGLPAAQNGVGDPSILVDTQTNTIWVVAAWTHGMGNQRAWWSSHPGMDLY
QTAQLVMAKSTDDGKTWSKPINITEQVKDPSWYFLLQGPGRGITMSDGTLVFPTQFIDSTRV
PNAGIMYSKDRGKTWKMHNMARTNTTEAQVVETEPGVLMLNMRDNRGGSRAVAITKDLGKTW
TEHPSSRKALQEPVCMASLIHVEAEDNVLDKDILLFSNPNTTRGRNHITIKASLDDGLTWLP
EHQLMLDEGEGWGYSCLTMIDRETIGILYESSAAHMTFQAVKLKDLIR
SEQ ID NO: 97:
MKKQVLLIILLALPLWLKAADVSVTGLRTEQMVDPMGLDTAAPRMSWRLESSQRNVMQTAYR
ILVASSPELLAQDKGDLWDSGKVESDASVWIPYQGKRLKSNQRVYWKVRSYTNRGETEWSEP
ARWGMGPLGEIHWKGRWIGWDAAFAWDREDSHSRLSSRYLRTEFKTQAKEIKYATLHLCGLG
MYELFINGQRIGDQVLAPAPSDYRRTVLYNSFDVTKQVAGGNADNAIGVTLGNGRFYTMRQN
YKPYKIPTFGYPKLRLNLIIEYTDGSIQRINSDEKWRLTAQGPIRSNNEYDGEIYDARMELG
NWTQPGYDDSKWLKAQRVSLPYGTLRGNTAPNMKVMKTLKPAVFKQYGDRYMIDFGQNMAGW
VRINIAKAAAGDTICIRYAERVKNDGTELDVENLRHSQSTDYYICNGKENNTSWSSRFSYHG
FQYVEVTGYKNLKAEDLVAEVVYDDLEDNGTFECSNDIMNRVYRNAWWGISSNYKGVPLDCP
QRDERQPWLGDHAMGTWGESFMFNNGNTYAKWADDIREAQREDGCIPDICPAYYNYYTSEMT
WSSTFPVICDMVYEQFGNIEPIRKNYAAIKKWMHHIRSEFTTEDGVINADKYGDWCMPPESP
ELIHSQDPARKTDGALIATAYYYKVSQMLAKFARLQGLEDEAKGFEKDAAKIKDCFNARFLT
VKKGTSPVQTPHVLYPDSIFYGNNTVTANILPLAFDMVPEAYREEVEKNVITGIITRNKGHI
SSGVIGMNWMMRELTRMGRGDVAFLLASNKTYPSYGYMIEKGATAIWELWNGDTANRWMNSC
NHVMILGDLLTWYFRDLAGFNPAQPAYKQIILKPDFSIQELSYVKASHNTLYGKMISNWKKT
LTHLEWDITVPCNTTALVYLPTLDEKAVKDKDVTFVRREGNSTVWSVPSGNYHFSVSMDPSS
GKNRAGIVEDQFLYEQASFPECHGATIVELKNGDLVASFFGGTKERNPDCCIWVCRKPKGAT
EWSAPYLAADGVFSLDDPQAVLAGITAESTPADAGPVVSTFKGDKSRARRKACWNPVLFQIP
GGDLILFYKIGLKVADWSGWLVRSKDGGKTWSQREPLPKGFLGPIKNKPEYVDGRIICPSST
EGDGGWRIHFEISDDKGKTWKMVGPVEAEMSVPTALRKANAANVDDQEGGEAIKGEGEKPIY
AIQPSILRHKDGRLQVLCRTRNAQIATSWSSDNGETWSKVTLLDVPNNNSGTDAVTMKDGRH
VLIYNDFSTLPGTPKGPRTPLCVAVSDDGIHWKNVMTLEDSPISQYSYPSIIQGKDGKLHAV
YTWRRQRVAYKELDLSKLK
SEQ ID NO: 98:
MVRSTKPSLLRRFGALVAAAAMLVVLPAGVSTASAASDDADMLTVTMTRTDALGDEVYVGDT
LTYSFTNTNNTSSAFTAFPAESNLSGVLTTGTPNCRYENLAGGASYPCSTASHTITADDLTA
GSFTPRTVWKATSDRGGTQVLQDNIVSTGDTVTVKEGKRPDPATIPTDRADGEAVRLATARQ
NLGTECYRIPALAEAPNGWILAAFDQRPNTAMANGSGVKCWDAPQPNSIVQRISKDGGKSWT
PIQYVAQGKNAPERYGYSDPSYVVDKETGEIFLFFVHSYNKGFADSQLGVDESNRNVLHAVV
VSSKDNGETWSKPRDITADITKGYENEWKSRFATSGAGIQLKYGKYKGRLIQQYAVGRTTGS
NAAVSVYSDDHGKTWQAGNPVTGMLMDENKVVELSDGRVMLNSRPGAAGYRRVAISEDGGVN
YGTVKNETQLPDPNNNAHITRAFPNAPEGSAKAKVLLYSSPRANNEGRANGVVRISLDDGTT
WSSGKLYKEGSMAYSVITALSDAAGGGYGLLYEGAWVTGGGIDSHDIMYTHISMDWLGYLSA
TADDVTASVEEGASTVDVTVPVSNVGSVDYTGVTVTPADLPTGWSASPVNVGALASGTSKDV
TVTVNVPATAKKDDVAKIVLRVTGTSAANANATTGFDGSITVNVTEKSEPDPEPEPTITGVS
AVTSQAGVKVGDVFDASKVSVTAAMSDGSSKALAAGEYSLSAVDADGKAVDLAEPFAAAGVV
TVTVSVPVEGAGPLTASFTIDVAEKSVDPEPKPEPEPKPEPEKPAGPKVDVPTEQPGLSKTG
ASTAGMSIVFVLLALSGIAALSLRRRSVH
SEQ ID NO: 99:
MCNKNNTFEKNLDISHKPEPLILFNKDNNIWNSKYFRIPNIQLLNDGTILTFSDIRYNGPDD
HAYIDIASARSTDFGKTWSYNIAMKNNRIDSTYSRVMDSTTVITNTGRIILIAGSWNTNGNW
AMTTSTRRSDWSVQMIYSDDNGLTWSNKIDLTKDSSKVKNQPSNTIGWLGGVGSGIVMDDGT
IVMPAQISLRENNENNYYSLIIYSKDNGETWTMGNKVPNSNTSENMVIELDGALIMSTRYDY
SGYRAAYISHDLGTTWEIYEPLNGKILTGKGSGCQGSFIKATTSNGHRIGLISAPKNTKGEY
IRDNIAVYMIDFDDLSKGVQEICIPYPEDGNKLGGGYSCLSFKNNHLGIVYEANGNIEYQDL
TPYYSLINKQ
SEQ ID NO: 100:
MCNKNNTFEKNLDISHHPEPLILFNKDANIWNSKYFRIPNVQLLNDVTILTFSDIRYNAPDD
HAYIDIASARSTDFGKTWSYNIAMKNNRIDSTYSRAMDSTTLITNTVRIILIASSWNTNGNW
AMTTSARRSDWSVQMIYSDDNGLTWSNKIDLTKDSSKVKNQPSNTIGWLGGVGSGITMDDGT
IVMPSQISARENNENNYYSLIIYSKDNGETWTMGNKVPNSNTSENMVIELDVALIMSTRYDY
SGYRAAYISHDLGTTWEIYEPLNGKILTGKGSGCQGSFIHATTSNGKRIALISAPKNTHGEY
IRDQIAVYMIDFDDLSKGVQEICIPYPEDGNKLGGGYSCLSFKNNHLGIVYDFNGNIEYQDL
YPYYSLINKQ
SEQ ID NO: 101:
MNYKGITLILTAAMVISGGNYVLVKGSTLDSGKNNSGYEIKVNNSENLSSLGEYKDINLESS
NASNITYDLEKYKNLDEGTIVVRFNSKDSKIQSLLGISNSKTKNGYFNFYVTNSRVGFELRN
QKNEGNTQNGTENLVHMYKDVALNDGDNTVALKIEKNKGYKLFLNGKMIKEVKDTNTKFLNN
IENLDSAFIGKTNRYGQSNEYNFKGNIGFMNIYNEPLGDDYLLSKTGETKAKEEVLVEGAVK
TEPVDLFHPGFLNSSNYRIPALFKTKEGTLIASIDARRQGGADAPNNDIDTAVRRSEDGGKT
WDEGQIIMDYPDKSSVIDTTLIQDDETGRIFLLVTHFPSKYGFWNAGLGSGFKNIDGKEYLC
LYDSSGKEFTVRENVVYDKDGNKTEYTTNALGDLFRNGTKIDNINSSTAPLKAKGTSYINLV
YSDDDGKTWSEPQNINFQVKKDWMKFLGIAPGRGIQIKNGEHKGRIVVPVYYTNEKGKQSSA
VIYSDDSGKNWTIGESPNDNRKLENGKIINSKTLSDDAPQLTECQVVEMPNGQLKLFMRNLS
GYLNIATSFDGGATWDETVEKDTNVLEPYCQLSVINYSQKIDGKDAVIFSNPNARSRSNGTV
RIGLINQVGTYENGEPKYEFDWKYNKLVKPGYYAYSCLTELSNGNIGLLYEGTPSEEMSYIE
MNLKYLESGANK
SEQ ID NO: 102:
MNYKGITLILTAAMVISGGNYVLVKGSTLDSGKNNSGYEIKVNNSESLSSLGEYKDINLESS
NASNITYDLEKYKNLDEGTIVVRFNSKDSKIQSLLGISNSKTKNGYFNFYVTNSRVGFELRN
QKNEGNTQSGTENLVHMYKDVALNDGDNTVALKIEKNKGYKLFLNGKIIKEVKDTNTKFLNN
IENLDSAFIGKTNRYGQSNEYNFKGNIGFMNIYNEPLGDDYLLSKTGETKAKEEVLVEGAVK
TEPVDLFHPGFLNSSNYRIPALFKTKEGTLIASIDARRHGGADAPNNDIDTAVRRSEDGGKT
WDEGQIIMDYPDKSSVIDTTLIQDDETGRIFLLVTHFPSKYGFWNAGLGSGFKNIDGKEYLC
LYDSSGKEFTVRENVVYDKDGNKTEYTTNALGDLFKNGTKIDNINSSTAPLKAKGTSYINLV
YSDDDGKTWSEPQNINFQVKKDWMKFLGIAPGRGIQIKNGEHKGRIVVPVYYTNEKGKQSSA
VIYSDDSGKNWTIGESPNDNRKLENGKIINSKTLSDDAPQLTECQVVEMPNGQLKLFMRNLS
GYLNIATSFDGGATWDETVEKDTNVLEPYCQLSVINYSQKIDGKDAVIFSNPNARSRSNGTV
RIGLINQVGTYENGEPKYEFDWKYNKLVKPGYYAYSCLTELSNGNIGLLYEGTPSEEMSYIE
MNLKYLESGANK
SEQ ID NO: 103:
MKSKKIIATLVASLVISNMGGYLVKANPNVNHKAVIIEDRQAIIETAIPQSEMTASATSEEG
QDPASSAIDGNINTMWHTKWNGSDALPQSLSVNLGKARKVSSIAITPRTSGNNGFITKYEIH
AINNGVETLVAEGTWEENNLVKTVTFDSPIDAEEIKITAIQGVGGFASIAELNVYEIKGEVD
EIANYGNLKITKEEERLNITGDLEKFSSLDEGTIVTRFNMNDTSIQSLIGLSDGNKANNYFS
LYVSGGKVGYELRRQEGNGDFNVHHSADVTFNKGINTLALKIEKGVGAKIFLNGSLVKTVSD
PNIKFLNAINLNSGFIGKTDRANGYNEYLFRGNIDFMNIYDKPVSDNYLLRKTGETKAPSED
SLLPDDVYKTQPVELFYPGYLESRGYRIPALETTKKGTVLASIDVRNNGDHDAPNNNIDVGI
RRKEVNGEWEEGKVILDYPGKSAAIDTSLMSATIEENGIEKERIFLIVTHFPEGYGFPNTEG
GSGYKEIDGKYYFILKDAQNNEYTVREDGIVYNSEGNQTDYVMKNDKTLIQNGEEVGNALLS
NSPLKAVGTAHIEMIYSDDDGKTWSEPEDLNPGLKKEWMKFFGTAPGKGIQIKNGEHKGRLV
FPIYYTNQNNFQSSAVIYSDDFGETWKLGESPIDTASVSSETVSSGTQLTECQVVEMPNGQL
KLFMRNTGSYTKIATSFDGGATWHDEVPEDTSLREPYCQLSVINYSGKINGKDAIIFSNPDA
SSRVNGSVKVGLINENGTYDNGEPRYEFDWIYNKTVKPGSFAYSCLTELPDGNLGLFYEGEG
AGRMAYTEFDLNYLKFNASEDSPSASVQSIEVLDEDLAYNSGEEVSIKVNFNQLVSIIGDRK
ITLDIGGVDVPLNMVNYEGKSSAIFKGTIPEGINQGNYEIKLKENNTLELNTVYNKVSTFNG
LDNTGINVQIGELKTTVGNSTIKVNDEVQVGSAFEAILGIEGLNGDTEVYSAEYLFEYNVEA
FILNEITSFNDSLFVKSKEVEPGKVRILVASLGNEIEKDSDLVKVNLTPKISSELEVLGLTT
ALVGAGDGNTHDLELSSKEVKINEEASGEIVVNPVQNFEIPEINKKNVKLTWNAPITTEGLE
GYVIYKDGKKLSEVPAESTEFVVSKLNRHTIYNFKVAAKYSNGELSAKESKTIRTAR
SEQ ID NO: 104:
MYSLIKKSISTIALSTLAITSLPTYSVSSQTTEEYGARKYFINNNIENIKNIENKSFDLIQN
LNTKILEKENIETLSGTVVDFTKEATSNSTIPNGLIIEKSNINITAGKGYDLSSEMGSEYVK
ALEKGTIIVSYKSTSNNSIQSLVSIGNNTSGNRDRHFHIYITNTGEVGMELRNTDSVLKYTL
GRPAAVRSIYKNNLVFNTIAFKADPSNKQYKLFANGELLATLNTDVYKFINDITGVNNVMLG
GTVRDGVIAYPFGGTIGNVKIYNEILTDEALKAETGATTYGKNIFYAGDSTKSNYFRIPSLL
SLRSGTVVSAADARYGGTHDSKSNIDIAFSKSLDGGIIWKNPTIPLQFNDYVARNIDWPRDS
IGKNVQIQGSASFIDPVLLEDKETKRLFIFADAMPAGIGSSNASTGSGYKDIAGKKYMKLRW
HQDGSSTYNYSIRENGVIYNDVTNLPTEYKIDGDYNLYKNGIALLYKQYDYNFSGTTLLETA
TNIDVNMNVFYKDSLFKVFPTTYLDMKYSDDEGETWSNLNIVSSFKPENSKFLVLGPGVGKQ
ISKGQYKGRLIVPLYSSSYAELGFMYSDDHGQTWNYVAADNRNTGTTAEAQIVEMPDGSLKS
YLRTGSGVIAEVTSINGGETWSDRVTVPNMHTTSYGTQLSVINYAGLIDGKEAIILSAPDSS
SARRNGKIWIGLISDTGASGINKYSIEWKYCYSVDSSNMGYSYSCLTELPNGDIGLLYEKYD
SWSRNELHLKNILKYETFSINELKQPISN
SEQ ID NO: 105:
GAMADIGSNIFYAGDATKSNYFRIPSLLALDSGTVIAAADARYGGTHDAKSKINTAFAKSTD
GGKTWGQPTLPLKFDDYVAKNIDWPRDSVGKNVQIQGSASYIDPVLLEDKETHRVFLFADMM
PAGIGSSNASVGSGFKEVDGKKYLKLHWKDDAAGTYDYSVRENGTIYNDTTNSATEYSVDGE
YNLYKNGNAMLCKQYDYNFEGTKLLETQTDTDVNMNVFYKDADFKVFPTTYLAMKYSDDEGE
TWSDLQIVSTFKPEESKFLVLGPGVGKQIANGEHAGRLIVPLYSKSSAELGFMYSDDHGNNW
TYVEADQNTGGATAEAQIVEMPDGSLKTYLRTGSGYIAQVMSTDGGETWSERVPLTEIATTG
YGTQLSVINYSQPVDGKPAILLSAPNATNGRKNGKIWIGLISETGNSGKDKYSVDWKYCYSV
DTPQMGYSYSCLTELPDGEIGLLYEKYDSWSRNELHLKNILKYERFNIDELKVQP
SEQ ID NO: 106:
MTVEKSVVFKAEGEHFTDQKGNTIVGSGSGGTTKYFRIPAMCTTSKGTIVVFADARHNTASD
QSFIDTAAARSTDGGKTWNKKIAIYNDRVNSKLSRVMDPTCIVANIQGRETILVMVGKWNNN
DKTWGAYRDKAPDTDWDLVLYKSTDDGVTFSKVETNIHDIVTKNGTISAMLGGVGSGLQLND
GKLVFPVQMVRTKNITTVLNTSFIYSTDGITWSLPSGYCEGFGSENNIIEFNASLVNNIRNS
GLRRSFETKDFGKTWTEFPPMDKKVDNRNHGVQGSTITIPSGNKLVAAHSSAQNKNNDYTRS
DISLYAHNLYSGEVKLIDDFYPKVGNASGAGYSCLSYRKNVDKETLYVVYEANGSIEFQDLS
RHLPVIKSYN
SEQ ID NO: 107:
MNKKKIMSILVSAFLITNLSSNIIFADIKENVYINQYSEGNRSQPIAEKLVPRSEIQASATS
ALTGEGPEKAIDGNTSTLWHTPWAGVDIQINPQSLTLKLGKTRNISSICVTPRQEGTNGMIT
DYKIYSGDDVIAEGKWKSDSSDKYVVFDNPISTDNIRIEAISTVGDENNKHASIAEVEVYEL
ADTPVKLAESNNKVINNGNGGNYEGDISEISLLEEGTAIIRFTNNGSSLFSISNNERTNEHF
HVYINGGAIGYELRKQSGNLATGSVNKALNAGINTIAFKAEKGKGYSIYLNGEKILTSSSIT
ANFLSTLEGLNTLSLGKTDRPSGSNEYNFTGEIDFFELYSKPLADRYLKERTGETTSKDLPF
PEGAVKTEPVDIETPGELGSNNFRIPALYTTKDGTVLASIDVRKGGGHDAPNNIDTGIKRST
DGGVTWDEGKIILDYPGASSAIDTSLLQDDETGRIFLIVTHFAEGYGFGNSKTGSGYVEIEG
KRYLKLLGANDTIYTVREGVVYDSNGEATNYTVDNNNELYENGNRIGNVLLSNSPLKVMGTS
FLSLIYSDDDGQTWSDPIDLNKEVKTDWMRFLGTGPGKGHQIKTGRYAGRLLFPVYLTNASG
FQSSAVIYSDDNGATWNIGETATDGRLMDNGDRASAETITTNTSGGVGQLTECQVVEMPNGQ
LKMFMRNTGGNSGRVRIATSFDGGATWEDDVVRDENIKEPYCQLSVINYSQKIDGKDAIIFA
IPDANYPNRVNGTVRVGLITENGSYENGEPRYDIEWRYNKVVAPGTYGYSCLSEMPNGEIGL
FYEGRGSRQMSFTRMNIDYLKADLLQDVPAANIKSYTTNSENNIYDPGDKISLNVTFDQTVS
LIGDRTITADIGGKEVLLTLANSKGGSEYTFEGTVPADISNGNYTITIKGKSGLKIVNVVNK
VTDITEDRNTGLNVQVGEEVQSVDKTLLQDLVDSTSNLIKEDYTEESWILYEKALEVANKFL
VNEIAVQEEVDAAKPTLENAYK
SEQ ID NO: 108:
MSYFRNRDIDIERNSMNRSVQERKCRYSIRKLSVGAVSMIVGAVVFGTSPVLAQEGASEQPL
ANETQLSGESSTLTDTEKSQPSSETELSGNKQEQERKDKQEEKIPRDYYARDLENVETVIEK
EDVETNASNGQRVDLSSELDKLKKLENATVHMEFKPDAKAPAFYNLFSVSSATKKDEYFTMA
VYNNTATLEGRGSDGKQFYNNYNDAPLKVKPGQWNSVTFTVEKPTAELPKGRVRLYVNGVLS
RTSLRSGNFIKDMPDVTHVQIGATKRANNTVWGSNLQIRNLTVYNRALTPEEVQKRSQLFKR
SDLEKKLPEGAALTEKTDIFESGRNGKPNKDGIKSYRIPALLKTDKGTLIAGADERRLHSSD
WGDIGMVIRRSEDNGKTWGDRVTITNLRDNPKASDPSIGSPVNIDMVLVQDPETKRIFSIYD
MFPEGKGIFGMSSQKEEAYKKIDGKTYQILYREGEKGAYTIRENGTVYTPDGKATDYRVVVD
PVKPAYSDKGDLYKGNQLLGNIYFTTNKTSPFRIAKDSYLWMSYSDDDGKTWSAPQDITPMV
KADWMKFLGVGPGTGIVLRNGPHKGRILIPVYTTNNVSHLNGSQSSRIIYSDDHGKTWHAGE
AVNDNRQVDGQKIHSSTMNNRRAQNTESTVVQLNNGDVKLFMRGLTGDLQVATSKDGGVTWE
KDIKRYPQVKDVYVQMSAIHTMHEGKEYIILSNAGGPKRENGMVHLARVEENGELTWLKHNP
IQKGEFAYNSLQELGNGEYGILYEHTEKGQNAYTLSFRKFNWDFLSKDLISPTEAKVKRTRE
MGKGVIGLEFDSEVLVNKAPTLQLANGKTARFMTQYDTKTLLFTVDSEDMGQKVTGLAEGAI
ESMHNLPVSVAGTKLSNGMNGSEAAVHEVPEYTGPLGTSGEEPAPTVEKPEYTGPLGTSGEE
PAPTVEKPEYTGPLGTAGEEAAPTVEKPEFTGGVNGTEPAVHEIAEYKGSDSLVTLTTKEDY
TYKAPLAQQALPETGNKESDLLASLGLTAFFLGLFTLGKKREQ
SEQ ID NO: 109:
LKEAKEKAIEELKKAGITSDYYFDLINKAKTVEGVNALKDEILKA
SEQ ID NO: 110:
(GGP)ₙ, where n is 1-5
SEQ ID NO: 111:
(GGGGS)ₙ, where n is 1-5
SEQ ID NO: 112:
GGGGSGGGGS
SEQ ID NO: 113:
ASLPVLQKESVFQSGAHAYRIPALLYLPGQQSLLAFAEQRASKKDEHAELIVLRRGDYDAPT
HQVQWQAQEVVAQARLDGHRSMNPCPLYDAQTGTLFLFFIAIPGQVTEQQQLQTRANVTRLC
QVTSTDHGRTWSSPRDLTDAAIGPAYREWSTFAVGPGHCLQLHDRARSLVVPAYAYRKLHPI
QRPIPSAFCFLSHDHGRTWARGHFVAQDTLECQVAEVETGEQRVVTLNARSHLRARVQAQST
NDGLDFQESQLVKKLVEPPPQGCQGSVISFPSPRSGPGSPAQWLLYTHPTHSWQRADLGAYL
NPRPPAPEAWSEPVLLAKGSCAYSDLQSMGTGPDGSPLFGCLYEANDYEEIVFLMFTLKQAF
PAEYLPQGGGGSGGGGSDKTHTCPPCPAPELLGGPSVFLFPPKPKDTLMISRTPEVTCVVVD
VSHEDPEVKFNWYVDGVEVHNAKTKPREEQYNSTYRVVSVLTVLHQDWLNGKEYKCKVSNKA
LPAPIEKTISKAKGQPREPQVYTLPPSREEMTKNQVSLTCLVKGFYPSDIAVEWESNGQPEN
NYKTTPPVLDSDGSFFLTSKLTVDKSRWQQGNVFSCSVMHEALHNHYTQKSLSLSPGK
SEQ ID NO: 114:
GCATCTCTGCCTGTGCTGCAGAAAGAAAGCGTGTTCCAGTCTGGCGCCCACGCCTACAGAAT
TCCCGCTCTGCTGTATCTGCCAGGCCAGCAGTCTCTGCTGGCTTTCGCTGAACAGCGGGCCA
GCAAGAAGGATGAGCACGCCGAACTGATCGTGCTGCGGAGAGGCGATTACGACGCCCCTACA
CATCAGGTGCAGTGGCAGGCTCAAGAGGTGGTGGCTCAGGCTAGACTGGACGGCCACAGATC
TATGAACCCCTGTCCTCTGTACGATGCCCAGACCGGCACACTGTTTCTGTTCTTTATCGCTA
TCCCCGGCCAAGTGACCGAGCAGCAGCAGCTGCAGACAAGAGCCAACGTGACCAGACTGTGT
CAAGTGACCTCCACCGACCACGGCAGAACCTGGTCTAGCCCTAGAGATCTGACCGACGCCGC
CATCGGACCTGCCTATAGAGAGTGGTCCACCTTCGCCGTTGGACCTGGACACTGTCTCCAGC
TGCACGACAGGGCTAGATCTCTGGTGGTGCCTGCCTACGCCTATAGAAAGCTGCACCCCATC
CAGCGGCCTATTCCTAGCGCCTTCTGCTTTCTGAGCCACGATCACGGCAGGACATGGGCCAG
AGGACATTTCGTGGCCCAGGACACACTGGAATGCCAGGTGGCCGAAGTGGAAACCGGCGAGC
AGAGAGTCGTGACCCTGAACGCCAGATCTCACCTGAGAGCCAGAGTGCAGGCCCAGAGCACA
AACGACGGCCTGGATTTCCAAGAGAGCCAGCTGGTCAAGAAACTGGTGGAACCTCCTCCACA
GGGCTGTCAGGGAAGCGTGATCAGCTTTCCATCTCCTAGAAGCGGCCCTGGCTCTCCTGCTC
AGTGGCTGCTGTATACACACCCCACACACAGCTGGCAGAGAGCCGATCTGGGCGCCTACCTG
AATCCTAGACCTCCTGCTCCTGAGGCTTGGAGCGAACCTGTTCTGCTGGCCAAGGGCAGCTG
TGCCTACAGCGATCTGCAGTCTATGGGCACAGGCCCTGATGGCAGCCCTCTGTTTGGCTGTC
TGTACGAGGCCAACGACTACGAAGAGATCGTGTTCCTGATGTTCACCCTGAAGCAGGCCTTT
CCAGCCGAGTACCTGCCTCAAGGCGGAGGTGGAAGTGGCGGAGGCGGATCcGACAAAACTCA
CACATGCCCACCGTGCCCAGCACCTGAACTCCTGGGGGGACCGTCAGTCTTCCTCTTCCCCC
CAAAACCCAAGGACACCCTCATGATCTCCCGGACCCCTGAGGTCACATGCGTGGTGGTGGAC
GTGAGCCACGAAGACCCTGAGGTCAAGTTCAACTGGTACGTGGACGGCGTGGAGGTGCATAA
TGCCAAGACAAAGCCGCGGGAGGAGCAGTACAACAGCACGTACCGTGTGGTCAGCGTCCTCA
CCGTCCTGCACCAGGACTGGCTGAATGGCAAGGAGTACAAGTGCAAGGTCTCCAACAAAGCC
CTCCCAGCCCCCATCGAGAAAACCATCTCCAAAGCCAAAGGGCAGCCCCGAGAACCACAGGT
cTACACCCTGCCCCCATCCCGGGAGGAGATGACCAAGAACCAGGTCAGCCTGACCTGCCTGG
TCAAAGGCTTCTATCCCAGCGACATCGCCGTGGAGTGGGAGAGCAATGGGCAGCCGGAGAAC
AACTACAAGACCACGCCTCCCGTGCTGGACTCCGACGGCTCCTTCTTCCTCTACAGCAAGCT
CACCGTGGACAAGAGCAGGTGGCAGCAGGGGAACGTCTTCTCATGCTCCGTGATGCATGAGG
CTCTGCACAACCACTACACGCAGAAGAGCCTCTCCCTGTCTCCGGGTAAA
SEQ ID NO: 115:
DASLPYLQKESVFQSGAHAYRIPALLYLPGQQSLLAFAEQRASKKDEHAELIVLRRGDYDAG
THQVQWQAQEVVAQARLDGHRSMNPCPLYDEQTGTLFLFFIAIPGQVTEQQQLQTRANVTRL
CQVTSTDHGRTWSSPRDLTDAAIGPAYREWSTFAVGPGHCLQLHDRARSLVVPAYAYRKLHP
KQRPIPSAFCFLSHDHGRTWARGHFVAQDTLECQVAEVETGEQRVVTLNARSHLRARVQAQS
TNDGLDFQESQLVKKLVEPPPQGCQGSVISFPSPRSGPGSPAQWLLYTHPTHSWQRADLGAY
LNPRPPAPEAWSEPVLLAKGSAAYSDLQSMGTGPDGSPLFGCLYEANDYEEIVFLMFTLKQA
FPAEYLPQGGGGSGGGGSDKTHTCPPCPAPELLGGPSVFLFPPKPKDTLMISRTPEVTCVVV
DVSHEDPEVKFNWYVDGVEVHNAKTKPREEQYNSTYRVVSVLTVLHQDWLNGKEYKCKVSNK
ALPAPIEKTISKAKGQPREPQVYTLPPSREEMTKNQVSLTCLVKGFYPSDIAVEWESNGQPE
NNYKTTPPVLDSDGSFFLTSKLTVDKSRWQQGNVFSCSVMHEALHNHYTQKSLSLSPGK
SEQ ID NO: 116:
GATGCATCTCTGCCTTACCTGCAGAAAGAAAGCGTGTTCCAGTCTGGCGCCCACGCCTACAG
AATTCCCGCTCTGCTGTATCTGCCAGGCCAGCAGTCTCTGCTGGCTTTCGCTGAACAGCGGG
CCAGCAAGAAGGATGAGCACGCCGAACTGATCGTGCTGCGGAGAGGCGATTACGACGCCGGC
ACACATCAGGTGCAGTGGCAGGCTCAAGAGGTGGTGGCTCAGGCTAGACTGGACGGCCACAG
ATCTATGAACCCCTGTCCTCTGTACGATGAACAGACCGGCACACTGTTTCTGTTCTTTATCG
CTATCCCCGGCCAAGTGACCGAGCAGCAGCAGCTGCAGACAAGAGCCAACGTGACCAGACTG
TGTCAAGTGACCTCCACCGACCACGGCAGAACCTGGTCTAGCCCTAGAGATCTGACCGACGC
CGCCATCGGACCTGCCTATAGAGAGTGGTCCACCTTCGCCGTTGGACCTGGACACTGTCTCC
AGCTGCACGACAGGGCTAGATCTCTGGTGGTGCCTGCCTACGCCTATAGAAAGCTGCACCCC
AAACAGCGGCCTATTCCTAGCGCCTTCTGCTTTCTGAGCCACGATCACGGCAGGACATGGGC
CAGAGGACATTTCGTGGCCCAGGACACACTGGAATGCCAGGTGGCCGAAGTGGAAACCGGCG
AGCAGAGAGTCGTGACCCTGAACGCCAGATCTCACCTGAGAGCCAGAGTGCAGGCCCAGAGC
ACAAACGACGGCCTGGATTTCCAAGAGAGCCAGCTGGTCAAGAAACTGGTGGAACCTCCTCC
ACAGGGCTGTCAGGGAAGCGTGATCAGCTTTCCATCTCCTAGAAGCGGCCCTGGCTCTCCTG
CTCAGTGGCTGCTGTATACACACCCCACACACAGCTGGCAGAGAGCCGATCTGGGCGCCTAC
CTGAATCCTAGACCTCCTGCTCCTGAGGCTTGGAGCGAACCTGTTCTGCTGGCCAAGGGCAG
CGCTGCCTACAGCGATCTGCAGTCTATGGGCACAGGCCCTGATGGCAGCCCTCTGTTTGGCT
GTCTGTACGAGGCCAACGACTACGAAGAGATCGTGTTCCTGATGTTCACCCTGAAGCAGGCC
TTTCCAGCCGAGTACCTGCCTCAAGGCGGAGGTGGAAGTGGCGGAGGCGGATCCGACAAAAC
TCACACATGCCCACCGTGCCCAGCACCTGAACTCCTGGGGGGACCGTCAGTCTTCCTCTTCC
CCCCAAAACCCAAGGACACCCTCATGATCTCCCGGACCCCTGAGGTCACATGCGTGGTGGTG
GACGTGAGCCACGAAGACCCTGAGGTCAAGTTCAACTGGTACGTGGACGGCGTGGAGGTGCA
TAATGCCAAGACAAAGCCGCGGGAGGAGCAGTACAACAGCACGTACCGTGTGGTCAGCGTCC
TCACCGTCCTGCACCAGGACTGGCTGAATGGCAAGGAGTACAAGTGCAAGGTCTCCAACAAA
GCCCTCCCAGCCCCCATCGAGAAAACCATCTCCAAAGCCAAAGGGCAGCCCCGAGAACCACA
GGTCTACACCCTGCCCCCATCCCGGGAGGAGATGACCAAGAACCAGGTCAGCCTGACCTGCC
TGGTCAAAGGCTTCTATCCCAGCGACATCGCCGTGGAGTGGGAGAGCAATGGGCAGCCGGAG
AACAACTACAAGACCACGCCTCCCGTGCTGGACTCCGACGGCTCCTTCTTCCTCACTAGCAA
GCTCACCGTGGACAAGAGCAGGTGGCAGCAGGGGAACGTCTTCTCATGCTCCGTGATGCATG
AGGCTCTGCACAACCACTACACGCAGAAGAGCCTCTCCCTGTCTCCGGGTAAA
SEQ ID NO: 117:
EEVTTCSFNSPLFRQEDDRGITYRIPALLYIPPTHTFLAFAEKRSTRRDEDALHLVLRRGLR
IGQLVQWGPLKPLMEATLPGHRTMNPCPVWEQKSGCVFLFFICVRGHVTERQQIVSGRNAAR
LCFIYSQDAGCSWSEVRDLTEEVIGSELKHWATFAVGPGHGIQLQSGRLVIPAYTYRKLHPK
QRTRPHSLMIYSDDLGVTWHHGRLIRPMVTVECEVAEVTGRAGHPVLYCSARTPNRCRAEAL
STDHGEGFQRLALSRQLCEPPHGCQGSVVSFRPLEIPHRCQDSSSKDAPTIQQSSPGSSLRL
EEEAGTPSESWLLYSHPTSRKQRVDLGIYLNQTPLEAACWSRPWILHCGPCGYSDLAALEEE
GLFGCLFECGTKQECEQIAFRLFTHREILSHLQGDCTSPGRNPSQFKSNGGGGSGGGGSDKT
HTCPPCPAPELLGGPSVFLFPPKPKDTLMISRTPEVTCVVVDVSHEDPEVKFNWYVDGVEVH
NAKTKPREEQYNSTYRVVSVLTVLHQDWLNGKEYKCKVSNKALPAPIEKTISKAKGQPREPQ
VYTLPPSREEMTKNQVSLTCLVKGFYPSDIAVEWESNGQPENNYKTTPPVLDSDGSFFLYSK
LTVDKSRWQQGNVFSCSVMHEALHNHYTQKSLSLSPGK
SEQ ID NO: 118:
GAGGAAGTGACCACCTGTAGCTTCAACAGCCCTCTGTTCCGGCAAGAGGACGACCGGGGCAT
CACCTACAGAATCCCTGCTCTGCTcTACATCCCTCCTACACACACCTTTCTGGCCTTCGCCG
AGAAGCGGAGCACCAGACGAGATGAAGATGCCCTGCACCTGGTGCTGAGAAGAGGCCTGAGA
ATCGGACAGCTGGTGCAGTGGGGACCTCTGAAGCCTCTGATGGAAGCCACACTGCCCGGCCA
CAGAACCATGAATCCTTGTCCTGTGTGGGAGCAGAAAAGCGGCTGCGTGTTCCTGTTCTTCA
TCTGCGTGCGGGGCCACGTGACCGAGAGACAGCAAATCGTGTCCGGCAGAAACGCCGCCAGA
CTGTGCTTCATCTACAGCCAGGATGCCGGCTGCTCTTGGAGCGAAGTTCGGGATCTGACCGA
AGAAGTGATCGGCAGCGAGCTGAAGCACTGGGCCACATTTGCTGTTGGCCCTGGCCACGGAA
TCCAGCTGCAATCTGGCAGACTGGTCATCCCCGCCTACACCTACAGAAAGCTGCACCCCAAA
CAGCGGACCCGGCCTCACAGCCTGATGATCTACAGCGACGATCTGGGCGTGACATGGCACCA
CGGCAGACTGATCAGACCCATGGTCACCGTGGAATGCGAGGTGGCCGAAGTGACAGGCAGAG
CTGGACACCCTGTGCTGTACTGCTCTGCCAGAACACCCAACCGGTGTAGAGCCGAGGCTCTG
TCTACAGATCACGGCGAGGGCTTTCAGAGACTGGCCCTCTCTAGACAGCTGTGCGAACCTCC
TCATGGCTGTCAGGGCAGCGTGGTGTCCTTCAGACCTCTGGAAATCCCTCACCGGTGCCAGG
ACAGCAGCTCTAAGGATGCCCCTACCATCCAGCAGTCTAGCCCTGGCAGCAGCCTGAGACTG
GAAGAGGAAGCCGGAACACCTAGCGAGAGCTGGCTGCTGTACTCTCACCCCACCAGCAGAAA
GCAGAGAGTGGACCTGGGCATCTACCTGAATCAGACCCCTCTGGAAGCCGCCTGTTGGAGCA
GACCTTGGATTCTGCACTGTGGCCCTTGCGGCTACTCTGATCTGGCCGCTCTGGAAGAAGAG
GGCCTGTTCGGCTGCCTGTTTGAGTGCGGCACAAAGCAAGAGTGCGAGCAGATCGCCTTCCG
GCTGTTCACCCACAGAGAGATCCTGAGCCATCTGCAGGGCGACTGCACAAGCCCAGGCAGAA
ATCCCAGCCAGTTCAAGAGCAACGGCGGAGGTGGAAGTGGCGGAGGCGGATCcGACAAAACT
CACACATGCCCACCGTGCCCAGCACCTGAACTCCTGGGGGGACCGTCAGTCTTCCTCTTCCC
CCCAAAACCCAAGGACACCCTCATGATCTCCCGGACCCCTGAGGTCACATGCGTGGTGGTGG
ACGTGAGCCACGAAGACCCTGAGGTCAAGTTCAACTGGTACGTGGACGGCGTGGAGGTGCAT
AATGCCAAGACAAAGCCGCGGGAGGAGCAGTACAACAGCACGTACCGTGTGGTCAGCGTCCT
CACCGTCCTGCACCAGGACTGGCTGAATGGCAAGGAGTACAAGTGCAAGGTCTCCAACAAAG
CCCTCCCAGCCCCCATCGAGAAAACCATCTCCAAAGCCAAAGGGCAGCCCCGAGAACCACAG
GTcTACACCCTGCCCCCATCCCGGGAGGAGATGACCAAGAACCAGGTCAGCCTGACCTGCCT
GGTCAAAGGCTTCTATCCCAGCGACATCGCCGTGGAGTGGGAGAGCAATGGGCAGCCGGAGA
ACAACTACAAGACCACGCCTCCCGTGCTGGACTCCGACGGCTCCTTCTTCCTCtaTAGCAAG
CTCACCGTGGACAAGAGCAGGTGGCAGCAGGGGAACGTCTTCTCATGCTCCGTGATGCATGA
GGCTCTGCACAACCACTACACGCAGAAGAGCCTCTCCCTGTCTCCGGGTAAA
SEQ ID NO: 119:
TVEKSVVFKAEGEHFTDQKGNTIVGSGSGGTTKYFRIPAMCTTSKGTIVVFADARHNTASDQ
SFIDTAAARSTDGGKTWNKKIAIYNDRVNSKLSRVMDPTCIVANIQGRETILVMVGKWNNND
KTWGAYRDKAPDTDWDLVLYKSTDDGVTFSKVETNIHDIVTKNGTISAMLGGVGSGLQLNDG
KLVFPVQMVRTKNITTVLNTSFIYSTDGITWSLPSGYCEGFGSENNIIEFNASLVNNIRNSG
LRRSFETKDFGKTWTEFPPMDKKVDNRNHGVQGSTITIPSGNKLVAAHSSAQNKNNDYTRSD
ISLYAHNLYSGEVKLIDDFYPKVGNASGAGYSCLSYRKNVDKETLYVVYEANGSIEFQDLSR
HLPVIKSYNGGGGSGGGGSDKTHTCPPCPAPELLGGPSVFLFPPKPKDTLMISRTPEVTCVV
VDVSHEDPEVKFNWYVDGVEVHNAKTKPREEQYNSTYRVVSVLTVLHQDWLNGKEYKCKVSN
KALPAPIEKTISKAKGQPREPQVYTLPPSREEMTKNQVSLTCLVKGFYPSDIAVEWESNGQP
ENNYKTTPPVLDSDGSFFLTSKLTVDKSRWQQGNVFSCSVMHEALHNHYTQKSLSLSPGK
SEQ ID NO: 120:
TVEKSVVFKAEGEHFTDQKGNTIVGSGSGGTTKYFRIPAMCTTSKGTIVVFADARHNTASDQ
SFIDTAAARSTDGGKTWNKKIAIYNDRVNSKLSRVMDPTCIVANIQGRETILVMVGKWNNND
KTWGAYRDKAPDTDWDLVLYKSTDDGVTFSKVETNIHDIVTKNGTISAMLGGVGSGLQLNDG
KLVFPVQMVRTKNITTVLNTSFIYSTDGITWSLPSGYCEGFGSENNIIEFNASLVNNIRNSG
LRRSFETKDFGKTWTEFPPMDKKVDNRNHGVQGSTITIPSGNKLVAAHSSAQNKNNDYTRSD
ISLYAHNLYSGEVKLIDDFYPKVGNASGAGYSCLSYRKNVDKETLYVVYEANGSIEFQDLSR
HLPVIKSYNGGGGSGGGGSDKTHTCPPCPAPELLGGPSVFLFPPKPKDTLMISRTPEVTCVV
VDVSHEDPEVKFNWYVDGVEVHNAKTKPREEQYNSTYRVVSVLTVLHQDWLNGKEYKCKVSN
KALPAPIEKTISKAKGQPREPQVYTLPPSREEMTKNQVSLYCLVKGFYPSDIAVEWESNGQP
ENNYKTTPPVLDSDGSFFLYSKLTVDKSRWQQGNVFSCSVMHEALHNHYTQKSLSLSPGK
SEQ ID NO: 121:
ACAGTGGAAAAGTCCGTGGTGTTCAAGGCCGAGGGCGAGCACTTCACCGACCAGAAAGGCAA
TACCATCGTCGGCTCTGGCAGCGGCGGCACCACCAAGTACTTTAGAATCCCCGCCATGTGCA
CCACCAGCAAGGGCACCATTGTGGTGTTCGCCGACGCCAGACACAACACCGCCAGCGATCAG
AGCTTCATCGATACCGCTGCCGCCAGAAGTACAGACGGCGGCAAGACCTGGAACAAGAAGAT
CGCCATCTACAACGACCGCGTGAACAGCAAGCTGAGCAGAGTGATGGACCCTACCTGCATCG
TGGCCAACATCCAGGGCAGAGAAACCATCCTGGTCATGGTCGGAAAGTGGAACAACAACGAT
AAGACCTGGGGCGCCTACAGAGACAAGGCCCCTGATACCGATTGGGACCTCGTGCTGTATAA
GAGCACCGACGACGGCGTGACCTTCAGCAAGGTGGAAACAAACATCCACGACATCGTGACCA
AGAACGGCACCATCTCTGCCATGCTCGGCGGCGTTGGATCTGGCCTGCAACTGAATGATGGC
AAGCTGGTGTTCCCCGTGCAGATGGTCCGAACAAAGAACATCACCACCGTGCTGAATACCAG
CTTCATCTACTCCACCGACGGCATCACATGGTCCCTGCCTAGCGGCTACTGTGAAGGCTTTG
GCAGCGAGAACAACATCATCGAGTTCAACGCCAGCCTGGTCAACAACATCCGGAACAGCGGC
CTGCGGAGAAGCTTCGAGACAAAGGACTTCGGAAAGACGTGGACCGAGTTTCCTCCAATGGA
CAAGAAGGTGGACAACCGGAACCACGGCGTGCAGGGCAGCACAATCACAATCCCTAGCGGCA
ACAAACTGGTGGCCGCTCACTCTAGCGCCCAGAACAAGAACAACGATTACACCAGAAGCGAC
ATCAGCCTGTACGCCCACAACCTGTACTCCGGCGAAGTGAAGCTGATCGACGACTTCTACCC
CAAAGTGGGCAATGCCAGCGGAGCCGGCTACAGCTGTCTGAGCTACCGGAAAAATGTGGACA
AAGAAACCCTGTACGTGGTGTACGAGGCCAACGGCAGCATCGAGTTTCAGGACCTGAGCAGA
CATCTGCCCGTGATCAAGAGCTACAATGGCGGAGGTGGAAGTGGCGGAGGCGGATCCGACAA
AACTCACACATGCCCACCGTGCCCAGCACCTGAACTCCTGGGGGGACCGTCAGTCTTCCTCT
TCCCCCCAAAACCCAAGGACACCCTCATGATCTCCCGGACCCCTGAGGTCACATGCGTGGTG
GTGGACGTGAGCCACGAAGACCCTGAGGTCAAGTTCAACTGGTACGTGGACGGCGTGGAGGT
GCATAATGCCAAGACAAAGCCGCGGGAGGAGCAGTACAACAGCACGTACCGTGTGGTCAGCG
TCCTCACCGTCCTGCACCAGGACTGGCTGAATGGCAAGGAGTACAAGTGCAAGGTCTCCAAC
AAAGCCCTCCCAGCCCCCATCGAGAAAACCATCTCCAAAGCCAAAGGGCAGCCCCGAGAACC
ACAGGTCTACACCCTGCCCCCATCCCGGGAGGAGATGACCAAGAACCAGGTCAGCCTGACCT
GCCTGGTCAAAGGCTTCTATCCCAGCGACATCGCCGTGGAGTGGGAGAGCAATGGGCAGCCG
GAGAACAACTACAAGACCACGCCTCCCGTGCTGGACTCCGACGGCTCCTTCTTCCTCACTAG
CAAGCTCACCGTGGACAAGAGCAGGTGGCAGCAGGGGAACGTCTTCTCATGCTCCGTGATGC
ATGAGGCTCTGCACAACCACTACACGCAGAAGAGCCTCTCCCTGTCTCCGGGTAAA
SEQ ID NO: 122:
ACAGTGGAAAAGTCCGTGGTGTTCAAGGCCGAGGGCGAGCACTTCACCGACCAGAAAGGCAA
TACCATCGTCGGCTCTGGCAGCGGCGGCACCACCAAGTACTTTAGAATCCCCGCCATGTGCA
CCACCAGCAAGGGCACCATTGTGGTGTTCGCCGACGCCAGACACAACACCGCCAGCGATCAG
AGCTTCATCGATACCGCTGCCGCCAGAAGTACAGACGGCGGCAAGACCTGGAACAAGAAGAT
CGCCATCTACAACGACCGCGTGAACAGCAAGCTGAGCAGAGTGATGGACCCTACCTGCATCG
TGGCCAACATCCAGGGCAGAGAAACCATCCTGGTCATGGTCGGAAAGTGGAACAACAACGAT
AAGACCTGGGGCGCCTACAGAGACAAGGCCCCTGATACCGATTGGGACCTCGTGCTGTATAA
GAGCACCGACGACGGCGTGACCTTCAGCAAGGTGGAAACAAACATCCACGACATCGTGACCA
AGAACGGCACCATCTCTGCCATGCTCGGCGGCGTTGGATCTGGCCTGCAACTGAATGATGGC
AAGCTGGTGTTCCCCGTGCAGATGGTCCGAACAAAGAACATCACCACCGTGCTGAATACCAG
CTTCATCTACTCCACCGACGGCATCACATGGTCCCTGCCTAGCGGCTACTGTGAAGGCTTTG
GCAGCGAGAACAACATCATCGAGTTCAACGCCAGCCTGGTCAACAACATCCGGAACAGCGGC
CTGCGGAGAAGCTTCGAGACAAAGGACTTCGGAAAGACGTGGACCGAGTTTCCTCCAATGGA
CAAGAAGGTGGACAACCGGAACCACGGCGTGCAGGGCAGCACAATCACAATCCCTAGCGGCA
ACAAACTGGTGGCCGCTCACTCTAGCGCCCAGAACAAGAACAACGATTACACCAGAAGCGAC
ATCAGCCTGTACGCCCACAACCTGTACTCCGGCGAAGTGAAGCTGATCGACGACTTCTACCC
CAAAGTGGGCAATGCCAGCGGAGCCGGCTACAGCTGTCTGAGCTACCGGAAAAATGTGGACA
AAGAAACCCTGTACGTGGTGTACGAGGCCAACGGCAGCATCGAGTTTCAGGACCTGAGCAGA
CATCTGCCCGTGATCAAGAGCTACAATGGCGGAGGTGGAAGTGGCGGAGGCGGATCCGACAA
AACTCACACATGCCCACCGTGCCCAGCACCTGAACTCCTGGGGGGACCGTCAGTCTTCCTCT
TCCCCCCAAAACCCAAGGACACCCTCATGATCTCCCGGACCCCTGAGGTCACATGCGTGGTG
GTGGACGTGAGCCACGAAGACCCTGAGGTCAAGTTCAACTGGTACGTGGACGGCGTGGAGGT
GCATAATGCCAAGACAAAGCCGCGGGAGGAGCAGTACAACAGCACGTACCGTGTGGTCAGCG
TCCTCACCGTCCTGCACCAGGACTGGCTGAATGGCAAGGAGTACAAGTGCAAGGTCTCCAAC
AAAGCCCTCCCAGCCCCCATCGAGAAAACCATCTCCAAAGCCAAAGGGCAGCCCCGAGAACC
ACAGGTCTACACCCTGCCCCCATCCCGGGAGGAGATGACCAAGAACCAGGTCAGCCTGTACT
GCCTGGTCAAAGGCTTCTATCCCAGCGACATCGCCGTGGAGTGGGAGAGCAATGGGCAGCCG
GAGAACAACTACAAGACCACGCCTCCCGTGCTGGACTCCGACGGCTCCTTCTTCCTCTATAG
CAAGCTCACCGTGGACAAGAGCAGGTGGCAGCAGGGGAACGTCTTCTCATGCTCCGTGATGC
ATGAGGCTCTGCACAACCACTACACGCAGAAGAGCCTCTCCCTGTCTCCGGGTAAA
SEQ ID NO: 123:
DASLPYLQKESVFQSGAHAYRIPALLYLPGQQSLLAFAEQRASKKDEHAELIVLRRGDYDAP
THQVQWQAQEVVAQARLDGHRSMNPCPLYDAQTGTLFLFFIAIPGQVTEQQQLQTRANVTRL
CQVTSTDHGRTWSSPRDLTDAAIGPAYREWSTFAVGPGHCLQLHDRARSLVVPAYAYRKLHP
KQRPIPSAFCFLSHDHGRTWARGHFVAQDTLECQVAEVETGEQRVVTLNARSHLRARVQAQS
TNDGLDFQESQLVKKLVEPPPQGCQGSVISFPSPRSGPGSPAQWLLYTHPTHSWQRADLGAY
LNPRPPAPEAWSEPVLLAKGSAAYSDLQSMGTGPDGSPLFGCLYEANDYEEIVFLMFTLKQA
FPAEYLPQGGGGSGGGGSDKTHTCPPCPAPELLGGPSVFLFPPKPKDTLMISRTPEVTCVVV
DVSHEDPEVKFNWYVDGVEVHNAKTKPREEQYNSTYRVVSVLTVLHQDWLNGKEYKCKVSNK
ALPAPIEKTISKAKGQPREPQVYTLPPSREEMTKNQVSLTCLVKGFYPSDIAVEWESNGQPE
NNYKTTPPVLDSDGSFFLTSKLTVDKSRWQQGNVFSCSVMHEALHNHYTQKSLSLSPGK
SEQ ID NO: 124:
DIQMTQSPSSLSASVGDRVTITCRASQDVNTAVAWYQQKPGKAPKLLIYSASFLYSGVPSRF
SGSRSGTDFTLTISSLQPEDFATYYCQQHYTTPPTFGQGTKVEIKRTVAAPSVFIFPPSDEQ
LKSGTASVVCLLNNFYPREAKVQWKVDNALQSGNSQESVTEQDSKDSTYSLSSTLTLSKADY
EKHKVYACEVTHQGLSSPVTKSFNRGEC
SEQ ID NO: 125:
GACATCCAGATGACACAGAGCCCTAGCAGCCTGTCTGCCAGCGTGGGAGACAGAGTGACCAT
CACCTGTAGAGCCAGCCAGGACGTGAACACAGCCGTGGCTTGGTATCAGCAGAAGCCTGGCA
AGGCCCCTAAGCTGCTGATCTACAGCGCCAGCTTTCTGTACTCCGGCGTGCCCAGCAGATTC
AGCGGCTCTAGAAGCGGCACCGACTTCACCCTGACCATAAGCAGTCTGCAGCCCGAGGACTT
CGCCACCTACTACTGTCAGCAGCACTACACCACACCTCCAACCTTTGGCCAGGGCACCAAGG
TGGAAATCAAGCGTACGGTGGCTGCACCATCTGTCTTCATCTTCCCGCCATCTGATGAGCAG
TTGAAATCTGGAACTGCCTCTGTTGTGTGCCTGCTGAATAACTTCTATCCCAGAGAGGCCAA
AGTACAGTGGAAGGTGGATAACGCCCTCCAATCGGGTAACTCCCAGGAGAGTGTCACAGAGC
AGGACAGCAAGGACAGCACCTACAGCCTCAGCAGCACCCTGACGCTGAGCAAAGCAGACTAC
GAGAAACACAAAGTCTACGCCTGCGAAGTCACCCATCAGGGCCTGAGCTCGCCCGTCACAAA
GAGCTTCAACAGGGGAGAGTGT
SEQ ID NO: 126:
EVQLVESGGGLVQPGGSLRLSCAASGFNIKDTYIHWVRQAPGKGLEWVARIYPTNGYTRYAD
SVKGRFTISADTSKNTAYLQMNSLRAEDTAVYYCSRWGGDGFYAMDYWGQGTLVTVSSASTK
GPSVFPLAPSSKSTSGGTAALGCLVKDYFPEPVTVSWNSGALTSGVHTFPAVLQSSGLYSLS
SVVTVPSSSLGTQTYICNVNHKPSNTKVDKKVEPKSCDKTHTCPPCPAPELLGGPSVFLFPP
KPKDTLMISRTPEVTCVVVDVSHEDPEVKFNWYVDGVEVHNAKTKPREEQYNSTYRVVSVLT
VLHQDWLNGKEYKCKVSNKALPAPIEKTISKAKGQPREPQVYTLPPSREEMTKNQVSLYCLV
KGFYPSDIAVEWESNGQPENNYKTTPPVLDSDGSFFLYSKLTVDKSRWQQGNVFSCSVMHEA
LHNHYTQKSLSLSPGK
SEQ ID NO: 127:
GAGGTGCAGCTGGTTGAATCTGGCGGAGGACTGGTTCAGCCTGGCGGATCTCTGAGACTGTC
TTGTGCCGCCAGCGGCTTCAACATCAAGGACACCTACATCCACTGGGTCCGACAGGCCCCTG
GCAAAGGACTTGAATGGGTCGCCAGAATCTACCCCACCAACGGCTACACCAGATACGCCGAC
TCTGTGAAGGGCAGATTCACCATCAGCGCCGACACCAGCAAGAACACCGCCTACCTGCAGAT
GAACAGCCTGAGAGCCGAGGACACCGCCGTGTACTACTGTTCTAGATGGGGAGGCGACGGCT
TCTACGCCATGGATTATTGGGGCCAGGGCACCCTGGTCACCGTTTCTTCTGCtagcACCAAG
GGCCCATCcGTCTTCCCCCTGGCACCCTCCTCCAAGAGCACCTCTGGGGGCACAGCGGCCCT
GGGCTGCCTGGTCAAGGACTACTTCCCCGAACCGGTGACGGTGTCcTGGAACTCAGGCGCtC
TGACCAGCGGCGTGCACACCTTCCCGGCTGTCCTACAGTCCTCAGGACTCTACTCCCTCAGC
AGCGTGGTGACCGTGCCCTCCAGCAGCTTGGGCACCCAGACCTACATCTGCAACGTGAATCA
CAAGCCGAGCAACACCAAGGTGGAGAAGAAAGTTGAGCCCAAATCTTGTGAGAAAACTCACA
CATGCCCACCGTGCCCAGCACCTGAACTCCTGGGGGGACCGTCAGTCTTCCTCTTCCCCCCA
AAACCCAAGGACACCCTCATGATCTCCCGGACCCCTGAGGTCACATGCGTGGTGGTGGACGT
GAGCCACGAAGACCCTGAGGTCAAGTTCAACTGGTACGTGGACGGCGTGGAGGTGCATAATG
CCAAGACAAAGCCGCGGGAGGAGCAGTACAACAGCACGTACCGTGTGGTCAGCGTCCTCACC
GTCCTGCACCAGGACTGGCTGAATGGCAAGGAGTACAAGTGCAAGGTCTCCAACAAAGCCCT
CCCAGCCCCCATCGAGAAAACCATCTCCAAAGCCAAAGGGCAGCCCCGAGAACCACAGGTcT
ACACCCTGCCCCCATCCCGGGAGGAGATGACCAAGAACCAGGTCAGCCTGtacTGCCTGGTC
AAAGGCTTCTATCCCAGCGACATCGCCGTGGAGTGGGAGAGCAATGGGCAGCCGGAGAACAA
CTACAAGACCACGCCTCCCGTGCTGGACTCCGACGGCTCCTTCTTCCTCTATAGCAAGCTCA
CCGTGGACAAGAGCAGGTGGCAGCAGGGGAACGTCTTCTCATGCTCCGTGATGCATGAGGCT
CTGCACAACCACTACACGCAGAAGAGCCTCTCCCTGTCTCCGGGTAAA
SEQ ID NO: 128:
GACGCCTCTTTACCCTATTTACAGAAGGAGAGCGTCTTTCAGTCCGGCGCTCACGCCTATAG
GATCCCCGCTTTACTGTATTTACCCGGTCAGCAGTCTTTACTGGCTTTCGCCGAGCAGCGGG
CTTCCAAGAAGGACGAGCACGCTGAGCTGATCGTGTTACGTAGGGGAGACTACGACGCCCCC
ACCCATCAAGTTCAATGGCAAGCTCAAGAAGTGGTGGCTCAAGCTCGGCTCGATGGCCATCG
GAGCATGAACCCTTGTCCCCTCTACGACGCCCAAACCGGCACTTTATTTCTGTTCTTCATCG
CCATCCCCGGTCAAGTTACCGAGCAGCAACAGCTGCAGACCCGGGCTAACGTGACAAGGCTG
TGCCAAGTTACCTCCACCGACCACGGAAGGACTTGGTCCTCCCCTCGTGATCTGACCGATGC
CGCTATCGGCCCCGCTTACCGGGAGTGGTCCACCTTTGCCGTGGGACCCGGCCATTGTCTGC
AGCTGCATGATAGGGCTCGGTCTTTAGTGGTGCCCGCTTACGCCTACCGGAAGCTGCACCCC
AAGCAGCGGCCTATCCCCTCCGCTTTTTGTTTTTTAAGCCATGACCATGGTCGTACTTGGGC
TCGTGGCCATTTTGTGGCCCAAGATACTTTAGAGTGCCAAGTTGCCGAGGTGGAGACTGGTG
AGCAGCGGGTGGTGACTTTAAATGCCCGGTCCCATTTAAGGGCTAGGGTGCAAGCCCAGTCC
ACCAACGACGGACTGGATTTCCAAGAATCCCAGCTGGTGAAGAAGCTCGTCGAACCTCCCCC
CCAAGGTTGCCAAGGAAGCGTGATCTCCTTCCCCTCCCCTAGGAGCGGACCCGGTTCCCCCG
CTCAGTGGCTGCTCTACACCCATCCCACCCATTCTTGGCAGAGGGCTGATTTAGGCGCCTAT
TTAAACCCTCGTCCTCCCGCTCCCGAAGCTTGGAGCGAGCCCGTGCTGCTCGCTAAGGGCAG
CGCCGCCTACAGCGATTTACAGTCCATGGGAACCGGACCCGATGGCAGCCCTCTGTTCGGCT
GTTTATATGAGGCTAACGACTACGAGGAGATCGTGTTTCTCATGTTCACTTTAAAGCAAGCT
TTTCCCGCTGAGTATCTGCCCCAAGGTGGAGGCGGCAGCGGCGGCGGCGGCTCCGACAAAAC
TCACACATGCCCACCGTGCCCAGCACCTGAACTCCTGGGGGGACCGTCAGTCTTCCTCTTCC
CCCCAAAACCCAAGGACACCCTCATGATCTCCCGGACCCCTGAGGTCACATGCGTGGTGGTG
GACGTGAGCCACGAAGACCCTGAGGTCAAGTTCAACTGGTACGTGGACGGCGTGGAGGTGCA
TAATGCCAAGACAAAGCCGCGGGAGGAGCAGTACAACAGCACGTACCGTGTGGTCAGCGTCC
TCACCGTCCTGCACCAGGACTGGCTGAATGGCAAGGAGTACAAGTGCAAGGTCTCCAACAAA
GCCCTCCCAGCCCCCATCGAGAAAACCATCTCCAAAGCCAAAGGGCAGCCCCGAGAACCACA
GGTGTACACCCTGCCCCCATCCCGGGAGGAGATGACCAAGAACCAGGTCAGCCTGACCTGCC
TGGTCAAAGGCTTCTATCCCAGCGACATCGCCGTGGAGTGGGAGAGCAATGGGCAGCCGGAG
AACAACTACAAGACCACGCCTCCCGTGCTGGACTCCGACGGCTCCTTCTTCCTCACCAGCAA
GCTCACCGTGGACAAGAGCAGGTGGCAGCAGGGGAACGTCTTCTCATGCTCCGTGATGCATG
AGGCTCTGCACAACCACTACACGCAGAAGAGCCTCTCCCTGTCTCCGGGTAAATGA
SEQ ID NO: 129:
ASLPYLQKESVFQSGAHAYRIPALLYLPGQQSLLAFAEQRASKKDEHAELIVLRRGDYDAPT
HQVQWQAQEVVAQARLDGHRSMNPCPLYDAQTGTLFLFFIAIPGQVTEQQQLQTRANVTRLC
QVTSTDHGRTWSSPRDLTDAAIGPAYREWSTFAVGPGHCLQLHDRARSLVVPAYAYRKLHPK
QRPIPSAFCFLSHDHGRTWARGHFVAQDTLECQVAEVETGEQRVVTLNARSHLRARVQAQST
NDGLDFQESQLVKKLVEPPPQGCQGSVISFPSPRSGPGSPAQWLLYTHPTHSWQRADLGAYL
NPRPPAPEAWSEPVLLAKGSCAYSDLQSMGTGPDGSPLFGCLYEANDYEEIVFLMFTLKQAF
PAEYLPQGGGGSGGGGSDKTHTCPPCPAPELLGGPSVFLFPPKPKDTLMISRTPEVTCVVVD
VSHEDPEVKFNWYVDGVEVHNAKTKPREEQYNSTYRVVSVLTVLHQDWLNGKEYKCKVSNKA
LPAPIEKTISKAKGQPREPQVYTLPPSREEMTKNQVSLTCLVKGFYPSDIAVEWESNGQPEN
NYKTTPPVLDSDGSFFLYSKLTVDKSRWQQGNVFSCSVMHEALHNHYTQKSLSLSPGK
SEQ ID NO: 130:
ASLPYLQKESVFQSGAHAYRIPALLYLPGQQSLLAFAEQRASKKDEHAELIVLRRGDYDAPT
HQVQWQAQEVVAQARLDGHRSMNPCPLYDAQTGTLFLFFIAIPGQVTEQQQLQTRANVTRLC
QVTSTDHGRTWSSPRDLTDAAIGPAYREWSTFAVGPGHCLQLHDRARSLVVPAYAYRKLHPK
QRPIPSAFCFLSHDHGRTWARGHFVAQDTLECQVAEVETGEQRVVTLNARSHLRARVQAQST
NDGLDFQESQLVKKLVEPPPQGCQGSVISFPSPRSGPGSPAQWLLYTHPTHSWQRADLGAYL
NPRPPAPEAWSEPVLLAKGSAAYSDLQSMGTGPDGSPLFGCLYEANDYEEIVFLMFTLKQAF
PAEYLPQGGGGSGGGGSDKTHTCPPCPAPELLGGPSVFLFPPKPKDTLMISRTPEVTCVVVD
VSHEDPEVKFNWYVDGVEVHNAKTKPREEQYNSTYRVVSVLTVLHQDWLNGKEYKCKVSNKA
LPAPIEKTISKAKGQPREPQVYTLPPSREEMTKNQVSLTCLVKGFYPSDIAVEWESNGQPEN
NYKTTPPVLDSDGSFFLYSKLTVDKSRWQQGNVFSCSVMHEALHNHYTQKSLSLSPGK
SEQ ID NO: 131:
AASLPYLQKESVFQSGAHAYRIPALLYLPGQQSLLAFAEQRASKKDEHAELIVLRRGDYDAP
THQVQWQAQEVVAQARLDGHRSMNPCPLYDAQTGTLFLFFIAIPGQVTEQQQLQTRANVTRL
CQVTSTDHGRTWSSPRDLTDAAIGPAYREWSTFAVGPGHCLQLHDRARSLVVPAYAYRKLHP
KQRPIPSAFCFLSHDHGRTWARGHFVAQDTLECQVAEVETGEQRVVTLNARSHLRARVQAQS
TNDGLDFQESQLVKKLVEPPPQGCQGSVISFPSPRSGPGSPAQWLLYTHPTHSWQRADLGAY
LNPRPPAPEAWSEPVLLAKGSAAYSDLQSMGTGPDGSPLFGCLYEANDYEEIVFLMFTLKQA
FPAEYLPQGGGGSGGGGSDKTHTCPPCPAPELLGGPSVFLFPPKPKDTLMISRTPEVTCVVV
DVSHEDPEVKFNWYVDGVEVHNAKTKPREEQYNSTYRVVSVLTVLHQDWLNGKEYKCKVSNK
ALPAPIEKTISKAKGQPREPQVYTLPPSREEMTKNQVSLTCLVKGFYPSDIAVEWESNGQPE
NNYKTTPPVLDSDGSFFLYSKLTVDKSRWQQGNVFSCSVMHEALHNHYTQKSLSLSPGK
SEQ ID NO: 132:
DASLPYLQKESVFQSGAHAYRIPALLYLPGQQSLLAFAEQRASKKDEHAELIVLRRGDYDAP
THQVQWQAQEVVAQARLDGHRSMNPCPLYDAQTGTLFLFFIAIPGQVTEQQQLQTRANVTRL
CQVTSTDHGRTWSSPRDLTDAAIGPAYREWSTFAVGPGHCLQLHDRARSLVVPAYAYRKLHP
KQRPIPSAFCFLSHDHGRTWARGHFVAQDTLECQVAEVETGEQRVVTLNARSHLRARVQAQS
TNDGLDFQESQLVKKLVEPPPQGCQGSVISFPSPRSGPGSPAQWLLYTHPTHSWQRADLGAY
LNPRPPAPEAWSEPVLLAKGSAAYSDLQSMGTGPDGSPLFGCLYEANDYEEIVFLMFTLKQA
FPAEYLPQGGGGSGGGGSDKTHTCPPCPAPELLGGPSVFLFPPKPKDTLMISRTPEVTCVVV
DVSHEDPEVKFNWYVDGVEVHNAKTKPREEQYNSTYRVVSVLTVLHQDWLNGKEYKCKVSNK
ALPAPIEKTISKAKGQPREPQVYTLPPSREEMTKNQVSLTCLVKGFYPSDIAVEWESNGQPE
NNYKTTPPVLDSDGSFFLYSKLTVDKSRWQQGNVFSCSVMHEALHNHYTQKSLSLSPGK
SEQ ID NO: 133:
AASLPYLQKESVFQSGAHAYRIPALLYLPGQQSLLAFAEQRASKKDEHAELIVLRRGDYDAP
THQVQWQAQEVVAQARLDGHRSMNPCPLYDAQTGTLFLFFIAIPGQVTEQQQLQTRANVTRL
CQVTSTDHGRTWSSPRDLTDAAIGPAYREWSTFAVGPGHCLQLHDRARSLVVPAYAYRKLHP
KQRPIPSAFCFLSHDHGRTWARGHFVAQDTLECQVAEVETGEQRVVTLNARSHLRARVQAQS
TNDGLDFQESQLVKKLVEPPPQGCQGSVISFPSPRSGPGSPAQWLLYTHPTHSWQRADLGAY
LNPRPPAPEAWSEPVLLAKGSCAYSDLQSMGTGPDGSPLFGCLYEANDYEEIVFLMFTLKQA
FPAEYLPQGGGGSGGGGSDKTHTCPPCPAPELLGGPSVFLFPPKPKDTLMISRTPEVTCVVV
DVSHEDPEVKFNWYVDGVEVHNAKTKPREEQYNSTYRVVSVLTVLHQDWLNGKEYKCKVSNK
ALPAPIEKTISKAKGQPREPQVYTLPPSREEMTKNQVSLTCLVKGFYPSDIAVEWESNGQPE
NNYKTTPPVLDSDGSFFLYSKLTVDKSRWQQGNVFSCSVMHEALHNHYTQKSLSLSPGK
SEQ ID NO: 134:
DASLPYLQKESVFQSGAHAYRIPALLYLPGQQSLLAFAEQRASKKDEHAELIVLRRGDYDAP
THQVQWQAQEVVAQARLDGHRSMNPCPLYDAQTGTLFLFFIAIPGQVTEQQQLQTRANVTRL
CQVTSTDHGRTWSSPRDLTDAAIGPAYREWSTFAVGPGHCLQLHDRARSLVVPAYAYRKLHP
KQRPIPSAFCFLSHDHGRTWARGHFVAQDTLECQVAEVETGEQRVVTLNARSHLRARVQAQS
TNDGLDFQESQLVKKLVEPPPQGCQGSVISFPSPRSGPGSPAQWLLYTHPTHSWQRADLGAY
LNPRPPAPEAWSEPVLLAKGSCAYSDLQSMGTGPDGSPLFGCLYEANDYEEIVFLMFTLKQA
FPAEYLPQGGGGSGGGGSDKTHTCPPCPAPELLGGPSVFLFPPKPKDTLMISRTPEVTCVVV
DVSHEDPEVKFNWYVDGVEVHNAKTKPREEQYNSTYRVVSVLTVLHQDWLNGKEYKCKVSNK
ALPAPIEKTISKAKGQPREPQVYTLPPSREEMTKNQVSLTCLVKGFYPSDIAVEWESNGQPE
NNYKTTPPVLDSDGSFFLYSKLTVDKSRWQQGNVFSCSVMHEALHNHYTQKSLSLSPGK
SEQ ID NO: 135:
MASLPYLQKESVFQSGAHAYRIPALLYLPGQQSLLAFAEQRASKKDEHAELIVLRRGDYDAP
THQVQWQAQEVVAQARLDGHRSMNPCPLYDAQTGTLFLFFIAIPGQVTEQQQLQTRANVTRL
CQVTSTDHGRTWSSPRDLTDAAIGPAYREWSTFAVGPGHCLQLHDRARSLVVPAYAYRKLHP
KQRPIPSAFCELSHDHGRTWARGHEVAQDTLECQVAEVETGEQRVVTLNARSHLRARVQAQS
TNDGLDFQESQLVKKLVEPPPQGCQGSVISFPSPRSGPGSPAQWLLYTHPTHSWQRADLGAY
LNPRPPAPEAWSEPVLLAKGSCAYSDLQSMGTGPDGSPLFGCLYEANDYEEIVFLMFTLKQA
FPAEYLPQGGGGSGGGGSDKTHTCPPCPAPELLGGPSVFLFPPKPKDTLMISRTPEVTCVVV
DVSHEDPEVKFNWYVDGVEVHNAKTKPREEQYNSTYRVVSVLTVLHQDWLNGKEYKCKVSNK
ALPAPIEKTISKAKGQPREPQVYTLPPSREEMTKNQVSLTCLVKGFYPSDIAVEWESNGQPE
NNYKTTPPVLDSDGSFFLYSKLTVDKSRWQQGNVFSCSVMHEALHNHYTQKSLSLSPGK
SEQ ID NO: 136:
MASLPYLQKESVFQSGAHAYRIPALLYLPGQQSLLAFAEQRASKKDEHAELIVLRRGDYDAP
THQVQWQAQEVVAQARLDGHRSMNPCPLYDAQTGTLFLFFIAIPGQVTEQQQLQTRANVTRL
CQVTSTDHGRTWSSPRDLTDAAIGPAYREWSTFAVGPGHCLQLHDRARSLVVPAYAYRKLHP
KQRPIPSAFCFLSHDHGRTWARGHFVAQDTLECQVAEVETGEQRVVTLNARSHLRARVQAQS
TNDGLDFQESQLVKKLVEPPPQGCQGSVISFPSPRSGPGSPAQWLLYTHPTHSWQRADLGAY
LNPRPPAPEAWSEPVLLAKGSAAYSDLQSMGTGPDGSPLFGCLYEANDYEEIVFLMFTLKQA
FPAEYLPQGGGGSGGGGSDKTHTCPPCPAPELLGGPSVFLFPPKPKDTLMISRTPEVTCVVV
DVSHEDPEVKFNWYVDGVEVHNAKTKPREEQYNSTYRVVSVLTVLHQDWLNGKEYKCKVSNK
ALPAPIEKTISKAKGQPREPQVYTLPPSREEMTKNQVSLTCLVKGFYPSDIAVEWESNGQPE
NNYKTTPPVLDSDGSFFLYSKLTVDKSRWQQGNVFSCSVMHEALHNHYTQKSLSLSPGK
SEQ ID NO: 137:
DASLPYLQKESVFQSGAHAYRIPALLYLPGQQSLLAFAEQRASKKDEHAELIVLRRGDYDAG
THQVQWQAQEVVAQARLDGHRSMNPCPLYDEQTGTLFLFFIAIPGQVTEQQQLQTRANVTRL
CQVTSTDHGRTWSSPRDLTDAAIGPAYREWSTFAVGPGHCLQLHDRARSLVVPAYAYRKLHP
KQRPIPSAFCFLSHDHGRTWARGHFVAQDTLECQVAEVETGEQRVVTLNARSHLRARVQAQS
TNDGLDFQESQLVKKLVEPPPQGCQGSVISFPSPRSGPGSPAQWLLYTHPTHSWQRADLGAY
LNPRPPAPEAWSEPVLLAKGSAAYSDLQSMGTGPDGSPLFGCLYEANDYEEIVFLMFTLKQA
FPAEYLPQGGGGSGGGGSDKTHTCPPCPAPELLGGPSVFLFPPKPKDTLMISRTPEVTCVVV
DVSHEDPEVKFNWYVDGVEVHNAKTKPREEQYNSTYRVVSVLTVLHQDWLNGKEYKCKVSNK
ALPAPIEKTISKAKGQPREPQVYTLPPSREEMTKNQVSLTCLVKGFYPSDIAVEWESNGQPE
NNYKTTPPVLDSDGSFFLYSKLTVDKSRWQQGNVFSCSVMHEALHNHYTQKSLSLSPGK
SEQ ID NO: 138:
DASLPYLQDESVFQSGAHAYRIPALLYLPGQQSLLAFAEQRASKKDEHAELIVLRRGDYDAP
THQVQWQAQEVVAQARLDGHRSMNPCPLYDEQTGTLFLFFIAIPGQVTEQQQLQTRANVTRL
CQVTSTDHGRTWSSPRDLTDAAIGPAYREWSTFAVGPGHCLQLHDRARSLVVPAYAYRKLHP
KQRPIPSAFCFLSHDHGRTWARGHFVAQDTLECQVAEVETGEQRVVTLNARSHLRARVQAQS
TNDGLDFQESQLVKKLVEPPPQGCQGSVISFPSPRSGPGSPAQWLLYTHPTHSWQRADLGAY
LNPRPPAPEAWSEPVLLAKGSAAYSDLQSMGTGPDGSPLFGCLYEANDYEEIRFIMFTLKQA
FPAEYLPQGGGGSGGGGSDKTHTCPPCPAPELLGGPSVFLFPPKPKDTLMISRTPEVTCVVV
DVSHEDPEVKFNWYVDGVEVHNAKTKPREEQYNSTYRVVSVLTVLHQDWLNGKEYKCKVSNK
ALPAPIEKTISKAKGQPREPQVYTLPPSREEMTKNQVSLTCLVKGFYPSDIAVEWESNGQPE
NNYKTTPPVLDSDGSFFLYSKLTVDKSRWQQGNVFSCSVMHEALHNHYTQKSLSLSPGK
SEQ ID NO: 139:
DASLPYLQKESVFQSGAHAYRIPALLYLPGQQSLLAFAEQRASKKDEHAELIVLRRGDYDAN
THQVQWQAQEVVAQARLDGHRSMNPCPLYDAQTGTLFLFFIAIPGQVTEQQQLQTRANVTRL
CQVTSTDHGRTWSSPRDLTDAAIGPAYREWSTFAVGPGHCLQLHDRARSLVVPAYAYRKLHP
KQRPIPSAFCFLSHDHGRTWARGHFVAQDTLECQVAEVETGEQRVVTLNARSHLRARVQAQS
TNDGLDFQESQLVKKLVEPPPQGCQGSVISFPSPRSGPGSPAQWLLYTHPTHSWQRADLGAY
LNPRPPAPEAWSEPVLLAKGSAAYSDLQSMGTGPDGSPLFGCLYEANDYEEIVFLMFTLKQA
FPAEYLPQGGGGSGGGGSDKTHTCPPCPAPELLGGPSVFLFPPKPKDTLMISRTPEVTCVVV
DVSHEDPEVKFNWYVDGVEVHNAKTKPREEQYNSTYRVVSVLTVLHQDWLNGKEYKCKVSNK
ALPAPIEKTISKAKGQPREPQVYTLPPSREEMTKNQVSLTCLVKGFYPSDIAVEWESNGQPE
NNYKTTPPVLDSDGSFFLYSKLTVDKSRWQQGNVFSCSVMHEALHNHYTQKSLSLSPGK
SEQ ID NO: 140:
DASLPYLQKESVFQSGAHAYRIPALLYLPGQQSLLAFAEQRASKKDEHAELIVLRRGDYDAP
THQVQWQAQEVVAQARLDGHRSMNPCPLYDAQTGTLFLFFIAIPGQVTEQQQLQTRANVTRL
CQVTSTDHGRTWSSPRDLTDAAIGPAYREWSTFAVGPGHCLQLHDRARSLVVPAYAYRKLHP
KQRPIPSAFCFLSHDHGRTWARGHFVAQDTLECQVAEVETGEQRVVTLNARSHLRARVQAQS
TNDGLDFQESQLVKKLVEPPPAGCQGSVISFPSPRSGPGSPAQWLLYTHPTHRKQRADLGAY
LNPRPPAPEAWSEPVLLAKGSAAYSDLQSMGTGPDGSPLFGCLYEANDYEEIVFLMFTLKQA
FPAEYLPQGGGGSGGGGSDKTHTCPPCPAPELLGGPSVFLFPPKPKDTLMISRTPEVTCVVV
DVSHEDPEVKFNWYVDGVEVHNAKTKPREEQYNSTYRVVSVLTVLHQDWLNGKEYKCKVSNK
ALPAPIEKTISKAKGQPREPQVYTLPPSREEMTKNQVSLTCLVKGFYPSDIAVEWESNGQPE
NNYKTTPPVLDSDGSFFLYSKLTVDKSRWQQGNVFSCSVMHEALHNHYTQKSLSLSPGK
SEQ ID NO: 141:
DASLPYLQKESVFQSGAHAYRIPALLYLPGQQSLLAFAEQRASKKDEHAELIVLRRGDYDAS
THQVQWQAQEVVAQARLDGHRSMNPCPLYDAQTGTLFLFFIAIPGQVTEQQQLQTRANVTRL
CQVTSTDHGRTWSSPRDLTDAAIGPAYREWSTFAVGPGHCLQLHDRARSLVVPAYAYRKLHP
KQRPIPSAFCFLSHDHGRTWARGHFVAQDTLECQVAEVETGEQRVVTLNARSHLRARVQAQS
TNDGLDFQESQLVKKLVEPPPAGCQGSVISFPSPRSGPGSPAQWLLYTHPTHRKQRADLGAY
LNPRPPAPEAWSEPVLLAKGSAAYSDLQSMGTGPDGSPLFGCLYEANDYEEIVFLMFTLKQA
FPAEYLPQGGGGSGGGGSDKTHTCPPCPAPELLGGPSVFLFPPKPKDTLMISRTPEVTCVVV
DVSHEDPEVKFNWYVDGVEVHNAKTKPREEQYNSTYRVVSVLTVLHQDWLNGKEYKCKVSNK
ALPAPIEKTISKAKGQPREPQVYTLPPSREEMTKNQVSLTCLVKGFYPSDIAVEWESNGQPE
NNYKTTPPVLDSDGSFFLYSKLTVDKSRWQQGNVFSCSVMHEALHNHYTQKSLSLSPGK
SEQ ID NO: 142:
DASLPYLQKESVFQSGAHAYRIPALLYLPGQQSLLAFAEQRASKKDEHAELIVLRRGDYDAT
THQVQWQAQEVVAQARLDGHRSMNPCPLYDAQTGTLFLFFIAIPGQVTEQQQLQTRANVTRL
CQVTSTDHGRTWSSPRDLTDAAIGPAYREWSTFAVGPGHCLQLHDRARSLVVPAYAYRKLHP
KQRPIPSAFCFLSHDHGRTWARGHFVAQDTLECQVAEVETGEQRVVTLNARSHLRARVQAQS
TNDGLDFQESQLVKKLVEPPPAGCQGSVISFPSPRSGPGSPAQWLLYTHPTHRKQRADLGAY
LNPRPPAPEAWSEPVLLAKGSAAYSDLQSMGTGPDGSPLFGCLYEANDYEEIVFLMFTLKQA
FPAEYLPQGGGGSGGGGSDKTHTCPPCPAPELLGGPSVFLFPPKPKDTLMISRTPEVTCVVV
DVSHEDPEVKFNWYVDGVEVHNAKTKPREEQYNSTYRVVSVLTVLHQDWLNGKEYKCKVSNK
ALPAPIEKTISKAKGQPREPQVYTLPPSREEMTKNQVSLTCLVKGFYPSDIAVEWESNGQPE
NNYKTTPPVLDSDGSFFLYSKLTVDKSRWQQGNVFSCSVMHEALHNHYTQKSLSLSPGK
SEQ ID NO: 143:
DASLPYLQKESVFQSGAHAYRIPALLYLPGQQSLLAFAEQRASKKDEHAELIVLRRGDYDAN
THQVQWQAQEVVAQARLDGHRSMNPCPLYDAQTGTLFLFFIAIPGQVTEQQQLQTRANVTRL
CQVTSTDHGRTWSSPRDLTDAAIGPAYREWSTFAVGPGHCLQLHDRARSLVVPAYAYRKLHP
KQRPIPSAFCFLSHDHGRTWARGHFVAQDTLECQVAEVETGEQRVVTLNARSHLRARVQAQS
TNDGLDFQESQLVKKLVEPPPAGCQGSVISFPSPRSGPGSPAQWLLYTHPTHRKQRADLGAY
LNPRPPAPEAWSEPVLLAKGSAAYSDLQSMGTGPDGSPLFGCLYEANDYEEIVFLMFTLKQA
FPAEYLPQGGGGSGGGGSDKTHTCPPCPAPELLGGPSVFLFPPKPKDTLMISRTPEVTCVVV
DVSHEDPEVKFNWYVDGVEVHNAKTKPREEQYNSTYRVVSVLTVLHQDWLNGKEYKCKVSNK
ALPAPIEKTISKAKGQPREPQVYTLPPSREEMTKNQVSLTCLVKGFYPSDIAVEWESNGQPE
NNYKTTPPVLDSDGSFFLYSKLTVDKSRWQQGNVFSCSVMHEALHNHYTQKSLSLSPGK
SEQ ID NO: 144:
ASLPYLQKESVFQSGAHAYRIPALLYLPGQQSLLAFAEQRASKKDEHAELIVLRRGDYDAPT
HQVQWQAQEVVAQARLDGHRSMNPCPLYDAQTGTLFLFFIAIPGQVTEQQQLQTRANVTRLC
QVTSTDHGRTWSSPRDLTDAAIGPAYREWSTFAVGPGHCLQLHDRARSLVVPAYAYRKLHPK
QRPIPSAFCFLSHDHGRTWARGHFVAQDTLECQVAEVETGEQRVVTLNARSHLRARVQAQST
NDGLDFQESQLVKKLVEPPPQGCQGSVISFPSPRSGPGSPAQWLLYTHPTHSWQRADLGAYL
NPRPPAPEAWSEPVLLAKGSCAYSDLQSMGTGPDGSPLFGCLYEANDYEEIVFLMFTLKQAF
PAEYLPQEPKSSDKTHTCPPCPAPELLGGPSVFLFPPKPKDTLMISRTPEVTCVVVDVSHED
PEVKFNWYVDGVEVHNAKTKPREEQYNSTYRVVSVLTVLHQDWLNGKEYKCKVSNKALPAPI
EKTISKAKGQPREPQVYTLPPSREEMTKNQVSLTCLVKGFYPSDIAVEWESNGQPENNYKTT
PPVLDSDGSFFLYSKLTVDKSRWQQGNVFSCSVMHEALHNHYTQKSLSLSPGK
SEQ ID NO: 145:
ASLPYLQKESVFQSGAHAYRIPALLYLPGQQSLLAFAEQRASKKDEHAELIVLRRGDYDAPT
HQVQWQAQEVVAQARLDGHRSMNPCPLYDAQTGTLFLFFIAIPGQVTEQQQLQTRANVTRLC
QVTSTDHGRTWSSPRDLTDAAIGPAYREWSTFAVGPGHCLQLHDRARSLVVPAYAYRKLHPK
QRPIPSAFCFLSHDHGRTWARGHFVAQDTLECQVAEVETGEQRVVTLNARSHLRARVQAQST
NDGLDFQESQLVKKLVEPPPQGCQGSVISFPSPRSGPGSPAQWLLYTHPTHSWQRADLGAYL
NPRPPAPEAWSEPVLLAKGSAAYSDLQSMGTGPDGSPLFGCLYEANDYEEIVFLMFTLKQAF
PAEYLPQEPKSSDKTHTCPPCPAPELLGGPSVFLFPPKPKDTLMISRTPEVTCVVVDVSHED
PEVKFNWYVDGVEVHNAKTKPREEQYNSTYRVVSVLTVLHQDWLNGKEYKCKVSNKALPAPI
EKTISKAKGQPREPQVYTLPPSREEMTKNQVSLTCLVKGFYPSDIAVEWESNGQPENNYKTT
PPVLDSDGSFFLYSKLTVDKSRWQQGNVFSCSVMHEALHNHYTQKSLSLSPGK
SEQ ID NO: 146:
AASLPYLQKESVFQSGAHAYRIPALLYLPGQQSLLAFAEQRASKKDEHAELIVLRRGDYDAP
THQVQWQAQEVVAQARLDGHRSMNPCPLYDAQTGTLFLFFIAIPGQVTEQQQLQTRANVTRL
CQVTSTDHGRTWSSPRDLTDAAIGPAYREWSTFAVGPGHCLQLHDRARSLVVPAYAYRKLHP
KQRPIPSAFCFLSHDHGRTWARGHFVAQDTLECQVAEVETGEQRVVTLNARSHLRARVQAQS
TNDGLDFQESQLVKKLVEPPPQGCQGSVISFPSPRSGPGSPAQWLLYTHPTHSWQRADLGAY
LNPRPPAPEAWSEPVLLAKGSAAYSDLQSMGTGPDGSPLFGCLYEANDYEEIVFLMFTLKQA
FPAEYLPQEPKSSDKTHTCPPCPAPELLGGPSVFLFPPKPKDTLMISRTPEVTCVVVDVSHE
DPEVKFNWYVDGVEVHNAKTKPREEQYNSTYRVVSVLTVLHQDWLNGKEYKCKVSNKALPAP
IEKTISKAKGQPREPQVYTLPPSREEMTKNQVSLTCLVKGFYPSDIAVEWESNGQPENNYKT
TPPVLDSDGSFFLYSKLTVDKSRWQQGNVFSCSVMHEALHNHYTQKSLSLSPGK
SEQ ID NO: 147:
DASLPYLQKESVFQSGAHAYRIPALLYLPGQQSLLAFAEQRASKKDEHAELIVLRRGDYDAP
THQVQWQAQEVVAQARLDGHRSMNPCPLYDAQTGTLFLFFIAIPGQVTEQQQLQTRANVTRL
CQVTSTDHGRTWSSPRDLTDAAIGPAYREWSTFAVGPGHCLQLHDRARSLVVPAYAYRKLHP
KQRPIPSAFCFLSHDHGRTWARGHFVAQDTLECQVAEVETGEQRVVTLNARSHLRARVQAQS
TNDGLDFQESQLVKKLVEPPPQGCQGSVISFPSPRSGPGSPAQWLLYTHPTHSWQRADLGAY
LNPRPPAPEAWSEPVLLAKGSAAYSDLQSMGTGPDGSPLFGCLYEANDYEEIVFLMFTLKQA
FPAEYLPQEPKSSDKTHTCPPCPAPELLGGPSVFLFPPKPKDTLMISRTPEVTCVVVDVSHE
DPEVKFNWYVDGVEVHNAKTKPREEQYNSTYRVVSVLTVLHQDWLNGKEYKCKVSNKALPAP
IEKTISKAKGQPREPQVYTLPPSREEMTKNQVSLTCLVKGFYPSDIAVEWESNGQPENNYKT
TPPVLDSDGSFFLYSKLTVDKSRWQQGNVFSCSVMHEALHNHYTQKSLSLSPGK
SEQ ID NO: 148:
AASLPYLQKESVFQSGAHAYRIPALLYLPGQQSLLAFAEQRASKKDEHAELIVLRRGDYDAP
THQVQWQAQEVVAQARLDGHRSMNPCPLYDAQTGTLFLFFIAIPGQVTEQQQLQTRANVTRL
CQVTSTDHGRTWSSPRDLTDAAIGPAYREWSTFAVGPGHCLQLHDRARSLVVPAYAYRKLHP
KQRPIPSAFCFLSHDHGRTWARGHFVAQDTLECQVAEVETGEQRVVTLNARSHLRARVQAQS
TNDGLDFQESQLVKKLVEPPPQGCQGSVISFPSPRSGPGSPAQWLLYTHPTHSWQRADLGAY
LNPRPPAPEAWSEPVLLAKGSCAYSDLQSMGTGPDGSPLFGCLYEANDYEEIVFLMFTLKQA
FPAEYLPQEPKSSDKTHTCPPCPAPELLGGPSVFLFPPKPKDTLMISRTPEVTCVVVDVSHE
DPEVKFNWYVDGVEVHNAKTKPREEQYNSTYRVVSVLTVLHQDWLNGKEYKCKVSNKALPAP
IEKTISKAKGQPREPQVYTLPPSREEMTKNQVSLTCLVKGFYPSDIAVEWESNGQPENNYKT
TPPVLDSDGSFFLYSKLTVDKSRWQQGNVFSCSVMHEALHNHYTQKSLSLSPGK
SEQ ID NO: 149:
DASLPYLQKESVFQSGAHAYRIPALLYLPGQQSLLAFAEQRASKKDEHAELIVLRRGDYDAP
THQVQWQAQEVVAQARLDGHRSMNPCPLYDAQTGTLFLFFIAIPGQVTEQQQLQTRANVTRL
CQVTSTDHGRTWSSPRDLTDAAIGPAYREWSTFAVGPGHCLQLHDRARSLVVPAYAYRKLHP
KQRPIPSAFCFLSHDHGRTWARGHFVAQDTLECQVAEVETGEQRVVTLNARSHLRARVQAQS
TNDGLDFQESQLVKKLVEPPPQGCQGSVISFPSPRSGPGSPAQWLLYTHPTHSWQRADLGAY
LNPRPPAPEAWSEPVLLAKGSCAYSDLQSMGTGPDGSPLFGCLYEANDYEEIVFLMFTLKQA
FPAEYLPQEPKSSDKTHTCPPCPAPELLGGPSVFLFPPKPKDTLMISRTPEVTCVVVDVSHE
DPEVKFNWYVDGVEVHNAKTKPREEQYNSTYRVVSVLTVLHQDWLNGKEYKCKVSNKALPAP
IEKTISKAKGQPREPQVYTLPPSREEMTKNQVSLTCLVKGFYPSDIAVEWESNGQPENNYKT
TPPVLDSDGSFFLYSKLTVDKSRWQQGNVFSCSVMHEALHNHYTQKSLSLSPGK
SEQ ID NO: 150:
MASLPYLQKESVFQSGAHAYRIPALLYLPGQQSLLAFAEQRASKKDEHAELIVLRRGDYDAP
THQVQWQAQEVVAQARLDGHRSMNPCPLYDAQTGTLFLFFIAIPGQVTEQQQLQTRANVTRL
CQVTSTDHGRTWSSPRDLTDAAIGPAYREWSTFAVGPGHCLQLHDRARSLVVPAYAYRKLHP
KQRPIPSAFCFLSHDHGRTWARGHFVAQDTLECQVAEVETGEQRVVTLNARSHLRARVQAQS
TNDGLDFQESQLVKKLVEPPPQGCQGSVISFPSPRSGPGSPAQWLLYTHPTHSWQRADLGAY
LNPRPPAPEAWSEPVLLAKGSCAYSDLQSMGTGPDGSPLFGCLYEANDYEEIVFLMFTLKQA
FPAEYLPQEPKSSDKTHTCPPCPAPELLGGPSVFLFPPKPKDTLMISRTPEVTCVVVDVSHE
DPEVKFNWYVDGVEVHNAKTKPREEQYNSTYRVVSVLTVLHQDWLNGKEYKCKVSNKALPAP
IEKTISKAKGQPREPQVYTLPPSREEMTKNQVSLTCLVKGFYPSDIAVEWESNGQPENNYKT
TPPVLDSDGSFFLYSKLTVDKSRWQQGNVFSCSVMHEALHNHYTQKSLSLSPGK
SEQ ID NO: 151:
MASLPYLQKESVFQSGAHAYRIPALLYLPGQQSLLAFAEQRASKKDEHAELIVLRRGDYDAP
THQVQWQAQEVVAQARLDGHRSMNPCPLYDAQTGTLFLFFIAIPGQVTEQQQLQTRANVTRL
CQVTSTDHGRTWSSPRDLTDAAIGPAYREWSTFAVGPGHCLQLHDRARSLVVPAYAYRKLHP
KQRPIPSAFCFLSHDHGRTWARGHFVAQDTLECQVAEVETGEQRVVTLNARSHLRARVQAQS
TNDGLDFQESQLVKKLVEPPPQGCQGSVISFPSPRSGPGSPAQWLLYTHPTHSWQRADLGAY
LNPRPPAPEAWSEPVLLAKGSAAYSDLQSMGTGPDGSPLFGCLYEANDYEEIVFLMFTLKQA
FPAEYLPQEPKSSDKTHTCPPCPAPELLGGPSVFLFPPKPKDTLMISRTPEVTCVVVDVSHE
DPEVKFNWYVDGVEVHNAKTKPREEQYNSTYRVVSVLTVLHQDWLNGKEYKCKVSNKALPAP
IEKTISKAKGQPREPQVYTLPPSREEMTKNQVSLTCLVKGFYPSDIAVEWESNGQPENNYKT
TPPVLDSDGSFFLYSKLTVDKSRWQQGNVFSCSVMHEALHNHYTQKSLSLSPGK
SEQ ID NO: 152:
DASLPYLQKESVFQSGAHAYRIPALLYLPGQQSLLAFAEQRASKKDEHAELIVLRRGDYDAG
THQVQWQAQEVVAQARLDGHRSMNPCPLYDEQTGTLFLFFIAIPGQVTEQQQLQTRANVTRL
CQVTSTDHGRTWSSPRDLTDAAIGPAYREWSTFAVGPGHCLQLHDRARSLVVPAYAYRKLHP
KQRPIPSAFCFLSHDHGRTWARGHFVAQDTLECQVAEVETGEQRVVTLNARSHLRARVQAQS
TNDGLDFQESQLVKKLVEPPPQGCQGSVISFPSPRSGPGSPAQWLLYTHPTHSWQRADLGAY
LNPRPPAPEAWSEPVLLAKGSAAYSDLQSMGTGPDGSPLFGCLYEANDYEEIVFLMFTLKQA
FPAEYLPQEPKSSDKTHTCPPCPAPELLGGPSVFLFPPKPKDTLMISRTPEVTCVVVDVSHE
DPEVKFNWYVDGVEVHNAKTKPREEQYNSTYRVVSVLTVLHQDWLNGKEYKCKVSNKALPAP
IEKTISKAKGQPREPQVYTLPPSREEMTKNQVSLTCLVKGFYPSDIAVEWESNGQPENNYKT
TPPVLDSDGSFFLYSKLTVDKSRWQQGNVFSCSVMHEALHNHYTQKSLSLSPGK
SEQ ID NO: 153:
DASLPYLQDESVFQSGAHAYRIPALLYLPGQQSLLAFAEQRASKKDEHAELIVLRRGDYDAP
THQVQWQAQEVVAQARLDGHRSMNPCPLYDEQTGTLFLFFIAIPGQVTEQQQLQTRANVTRL
CQVTSTDHGRTWSSPRDLTDAAIGPAYREWSTFAVGPGHCLQLHDRARSLVVPAYAYRKLHP
KQRPIPSAFCFLSHDHGRTWARGHFVAQDTLECQVAEVETGEQRVVTLNARSHLRARVQAQS
TNDGLDFQESQLVKKLVEPPPQGCQGSVISFPSPRSGPGSPAQWLLYTHPTHSWQRADLGAY
LNPRPPAPEAWSEPVLLAKGSAAYSDLQSMGTGPDGSPLFGCLYEANDYEEIRFIMFTLKQA
FPAEYLPQEPKSSDKTHTCPPCPAPELLGGPSVFLFPPKPKDTLMISRTPEVTCVVVDVSHE
DPEVKFNWYVDGVEVHNAKTKPREEQYNSTYRVVSVLTVLHQDWLNGKEYKCKVSNKALPAP
IEKTISKAKGQPREPQVYTLPPSREEMTKNQVSLTCLVKGFYPSDIAVEWESNGQPENNYKT
TPPVLDSDGSFFLYSKLTVDKSRWQQGNVFSCSVMHEALHNHYTQKSLSLSPGK
SEQ ID NO: 154:
DASLPYLQKESVFQSGAHAYRIPALLYLPGQQSLLAFAEQRASKKDEHAELIVLRRGDYDAN
THQVQWQAQEVVAQARLDGHRSMNPCPLYDAQTGTLFLFFIAIPGQVTEQQQLQTRANVTRL
CQVTSTDHGRTWSSPRDLTDAAIGPAYREWSTFAVGPGHCLQLHDRARSLVVPAYAYRKLHP
KQRPIPSAFCFLSHDHGRTWARGHFVAQDTLECQVAEVETGEQRVVTLNARSHLRARVQAQS
TNDGLDFQESQLVKKLVEPPPQGCQGSVISFPSPRSGPGSPAQWLLYTHPTHSWQRADLGAY
LNPRPPAPEAWSEPVLLAKGSAAYSDLQSMGTGPDGSPLFGCLYEANDYEEIVFLMFTLKQA
FPAEYLPQEPKSSDKTHTCPPCPAPELLGGPSVFLFPPKPKDTLMISRTPEVTCVVVDVSHE
DPEVKFNWYVDGVEVHNAKTKPREEQYNSTYRVVSVLTVLHQDWLNGKEYKCKVSNKALPAP
IEKTISKAKGQPREPQVYTLPPSREEMTKNQVSLTCLVKGFYPSDIAVEWESNGQPENNYKT
TPPVLDSDGSFFLYSKLTVDKSRWQQGNVFSCSVMHEALHNHYTQKSLSLSPGK
SEQ ID NO: 155:
DASLPYLQKESVFQSGAHAYRIPALLYLPGQQSLLAFAEQRASKKDEHAELIVLRRGDYDAP
THQVQWQAQEVVAQARLDGHRSMNPCPLYDAQTGTLFLFFIAIPGQVTEQQQLQTRANVTRL
CQVTSTDHGRTWSSPRDLTDAAIGPAYREWSTFAVGPGHCLQLHDRARSLVVPAYAYRKLHP
KQRPIPSAFCFLSHDHGRTWARGHFVAQDTLECQVAEVETGEQRVVTLNARSHLRARVQAQS
TNDGLDFQESQLVKKLVEPPPAGCQGSVISFPSPRSGPGSPAQWLLYTHPTHRKQRADLGAY
LNPRPPAPEAWSEPVLLAKGSAAYSDLQSMGTGPDGSPLFGCLYEANDYEEIVFLMFTLKQA
FPAEYLPQEPKSSDKTHTCPPCPAPELLGGPSVFLFPPKPKDTLMISRTPEVTCVVVDVSHE
DPEVKFNWYVDGVEVHNAKTKPREEQYNSTYRVVSVLTVLHQDWLNGKEYKCKVSNKALPAP
IEKTISKAKGQPREPQVYTLPPSREEMTKNQVSLTCLVKGFYPSDIAVEWESNGQPENNYKT
TPPVLDSDGSFFLYSKLTVDKSRWQQGNVFSCSVMHEALHNHYTQKSLSLSPGK
SEQ ID NO: 156:
DASLPYLQKESVFQSGAHAYRIPALLYLPGQQSLLAFAEQRASKKDEHAELIVLRRGDYDAS
THQVQWQAQEVVAQARLDGHRSMNPCPLYDAQTGTLFLFFIAIPGQVTEQQQLQTRANVTRL
CQVTSTDHGRTWSSPRDLTDAAIGPAYREWSTFAVGPGHCLQLHDRARSLVVPAYAYRKLHP
KQRPIPSAFCFLSHDHGRTWARGHFVAQDTLECQVAEVETGEQRVVTLNARSHLRARVQAQS
TNDGLDFQESQLVKKLVEPPPAGCQGSVISFPSPRSGPGSPAQWLLYTHPTHRKQRADLGAY
LNPRPPAPEAWSEPVLLAKGSAAYSDLQSMGTGPDGSPLFGCLYEANDYEEIVFLMFTLKQA
FPAEYLPQEPKSSDKTHTCPPCPAPELLGGPSVFLFPPKPKDTLMISRTPEVTCVVVDVSHE
DPEVKFNWYVDGVEVHNAKTKPREEQYNSTYRVVSVLTVLHQDWLNGKEYKCKVSNKALPAP
IEKTISKAKGQPREPQVYTLPPSREEMTKNQVSLTCLVKGFYPSDIAVEWESNGQPENNYKT
TPPVLDSDGSFFLYSKLTVDKSRWQQGNVFSCSVMHEALHNHYTQKSLSLSPGK
SEQ ID NO: 157:
DASLPYLQKESVFQSGAHAYRIPALLYLPGQQSLLAFAEQRASKKDEHAELIVLRRGDYDAT
THQVQWQAQEVVAQARLDGHRSMNPCPLYDAQTGTLFLFFIAIPGQVTEQQQLQTRANVTRL
CQVTSTDHGRTWSSPRDLTDAAIGPAYREWSTFAVGPGHCLQLHDRARSLVVPAYAYRKLHP
KQRPIPSAFCFLSHDHGRTWARGHFVAQDTLECQVAEVETGEQRVVTLNARSHLRARVQAQS
TNDGLDFQESQLVKKLVEPPPAGCQGSVISFPSPRSGPGSPAQWLLYTHPTHRKQRADLGAY
LNPRPPAPEAWSEPVLLAKGSAAYSDLQSMGTGPDGSPLFGCLYEANDYEEIVFLMFTLKQA
FPAEYLPQEPKSSDKTHTCPPCPAPELLGGPSVFLFPPKPKDTLMISRTPEVTCVVVDVSHE
DPEVKFNWYVDGVEVHNAKTKPREEQYNSTYRVVSVLTVLHQDWLNGKEYKCKVSNKALPAP
IEKTISKAKGQPREPQVYTLPPSREEMTKNQVSLTCLVKGFYPSDIAVEWESNGQPENNYKT
TPPVLDSDGSFFLYSKLTVDKSRWQQGNVFSCSVMHEALHNHYTQKSLSLSPGK
SEQ ID NO: 158:
DASLPYLQKESVFQSGAHAYRIPALLYLPGQQSLLAFAEQRASKKDEHAELIVLRRGDYDAN
THQVQWQAQEVVAQARLDGHRSMNPCPLYDAQTGTLFLFFIAIPGQVTEQQQLQTRANVTRL
CQVTSTDHGRTWSSPRDLTDAAIGPAYREWSTFAVGPGHCLQLHDRARSLVVPAYAYRKLHP
KQRPIPSAFCFLSHDHGRTWARGHFVAQDTLECQVAEVETGEQRVVTLNARSHLRARVQAQS
TNDGLDFQESQLVKKLVEPPPAGCQGSVISFPSPRSGPGSPAQWLLYTHPTHRKQRADLGAY
LNPRPPAPEAWSEPVLLAKGSAAYSDLQSMGTGPDGSPLFGCLYEANDYEEIVFLMFTLKQA
FPAEYLPQEPKSSDKTHTCPPCPAPELLGGPSVFLFPPKPKDTLMISRTPEVTCVVVDVSHE
DPEVKFNWYVDGVEVHNAKTKPREEQYNSTYRVVSVLTVLHQDWLNGKEYKCKVSNKALPAP
IEKTISKAKGQPREPQVYTLPPSREEMTKNQVSLTCLVKGFYPSDIAVEWESNGQPENNYKT
TPPVLDSDGSFFLYSKLTVDKSRWQQGNVFSCSVMHEALHNHYTQKSLSLSPGK
SEQ ID NO: 167:
EPKSCDKTHTCPPCPAPELLGGPSVFLFPPKPKDTLMISRTPEVTCVVVDVSHEDPEVKFNW
YVDGVEVHNAKTKPREEQYNSTYRVVSVLTVLHQDWLNGKEYKCKVSNKALPAPIEKTISKA
KGQPREPQVYTLPPSREEMTKNQVSLTCLVKGFYPSDIAVEWESNGQPENNYKTTPPVLDSD
GSFFLTSKLTVDKSRWQQGNVFSCSVMHEALHNHYTQKSLSLSPGK
SEQ ID NO: 168:
DKTHTCPPCPAPELLGGPSVFLFPPKPKDTLMISRTPEVTCVVVDVSHEDPEVKFNWYVDGV
EVHNAKTKPREEQYNSTYRVVSVLTVLHQDWLNGKEYKCKVSNKALPAPIEKTISKAKGQPR
EPQVYTLPPSREEMTKNQVSLYCLVKGFYPSDIAVEWESNGQPENNYKTTPPVLDSDGSFFL
YSKLTVDKSRWQQGNVFSCSVMHEALHNHYTQKSLSLSPGK
SEQ ID NO: 169:
DASLPYLQKESVFQSGAHAYRIPALLYLPGQQSLLAFAEQRASKKDEHAELIVLRRGDYDAG
THQVQWQAQEVVAQARLDGHRSMNPCPLYDEQTGTLFLFFIAIPGQVTEQQQLQTRANVTRL
CQVTSTDHGRTWSSPRDLTDAAIGPAYREWSTFAVGPGHCLQLHDRARSLVVPAYAYRKLHP
KQRPIPSAFCFLSHDHGRTWARGHFVAQDTLECQVAEVETGEQRVVTLNARSHLRARVQAQS
TNDGLDFQESQLVKKLVEPPPQGCQGSVISFPSPRSGPGSPAQWLLYTHPTHARQRADLGAY
LNPRPPAPEAWSEPVLLAKGSAAYSDLQSMGTGPDGSPLFGCLYEANDYEEIVFLMFTLKQA
FPAEYLPQ
SEQ ID NO: 170:
DASLPYLQKESVFQSGAHAYRIPALLYLPGQQSLLAFAEQRASKKDEHAELIVLRRGDYDAG
THQVQWQAQEVVAQARLDGHRSMNPCPLYDEQTGTLFLFFIAIPGQVTEQQQLQTRANVTRL
CYVTSTDHGRTWSSPRDLTDAAIGPAYREWSTFAVGPGHCLQLHDRARSLVVPAYAYRKLHP
KQRPIPSAFCFLSHDHGRTWARGHFVAQDTLECQVAEVETGEQRVVTLNARSHLRARVQAQS
TNDGLDFQESQLVKKLVEPPPTGCQGSVISFPSPRSGPGSPAQWLLYTHPTHSWQRADLGAY
LNPRPPAPEAWSEPVLLAKGSAAYSDLQSMGTGPDGSPLFGCLYEANDYEEIVFLMFTLKQA
FPAEYLPQ
SEQ ID NO: 171:
DASLPYLQKESVFQSGAHAYRIPALLYLPGQQSLLAFAEQRASKKDEHAELIVLRRGDYDAG
THQVQWQAQEVVAQARLDGHRSMNPCPLYDEQTGTLFLFFIAIPGQVTEQQQLQTRANVTRL
CYVTSTDHGRTWSSPRDLTDAAIGPAYREWSTFAVGPGHCLQLHDRARSLVVPAYAYRKLHP
KQRPIPSAFCFLSHDHGRTWARGHFVAQDTLECQVAEVETGEQRVVTLNARSHLRFRVQAQS
TNDGLDFQESQLVKKLVEPPPTGCQGSVISFPSPRSGPGSPAQWLLYTHPTHSWQRADLGAY
LNPRPPAPEAWSEPVLLAKGSAAYSDLQSMGTGPDGSPLFGCLYEANDYEEIVFLMFTLKQA
FPAEYLPQ
SEQ ID NO: 175:
DASLPYLQDESVFQSGAHAYRIPALLYLPGQQSLLAFAEQRASKKDEHAELIVLRRGDYDAP
THQVQWQAQEVVAQARLDGHRSMNPCPLYDEQTGTLFLFFIAIPGQVTEQQQLQTRANVTRL
CQVTSTDHGRTWSSPRDLTDAAIGPAYREWSTFAVGPGHCLQLHDRARSLVVPAYAYRKLHP
KQRPIPSAFCFLSHDHGRTWARGHFVAQDTLANQVAEVETGEQRVVTLNARSHLRARVQAQS
TNDGLDFQESQLVKKLVEPPPQGCQGSVISFPSPRSGPGSPAQWLLYTHPTHSWQRADLGAY
LNPRPPAPEAWSEPVLLAKGSAAYSDLQSMGTGPDGSPLFGCLYEANDYEEIRFRMETLKQA
FPAEYLPQGGGGSGGGGSDKTHTCPPCPAPELLGGPSVFLFPPKPKDTLMISRTPEVTCVVV
DVSHEDPEVKFNWYVDGVEVHNAKTKPREEQYNSTYRVVSVLTVLHQDWLNGKEYKCKVSNK
ALPAPIEKTISKAKGQPREPQVYTLPPSREEMTKNQVSLTCLVKGFYPSDIAVEWESNGQPE
NNYKTTPPVLDSDGSFFLTSKLTVDKSRWQQGNVFSCSVMHEALHNHYTQKSLSLSPGK
SEQ ID NO: 176:
GATGCATCTCTGCCTTACCTGCAGGATGAAAGCGTGTTCCAGTCTGGCGCCCACGCCTACAG
AATTCCCGCTCTGCTGTATCTGCCAGGCCAGCAGTCTCTGCTGGCTTTCGCTGAACAGCGGG
CCAGCAAGAAGGATGAGCACGCCGAACTGATCGTGCTGCGGAGAGGCGATTACGACGCCcct
ACACATCAGGTGCAGTGGCAGGCTCAAGAGGTGGTGGCTCAGGCTAGACTGGACGGCCACAG
ATCTATGAACCCCTGTCCTCTGTACGATGAACAGACCGGCACACTGTTTCTGTTCTTTATCG
CTATCCCCGGCCAAGTGACCGAGCAGCAGCAGCTGCAGACAAGAGCCAACGTGACCAGACTG
TGTCAAGTGACCTCCACCGACCACGGCAGAACCTGGTCTAGCCCTAGAGATCTGACCGACGC
CGCCATCGGACCTGCCTATAGAGAGTGGTCCACCTTCGCCGTTGGACCTGGACACTGTCTCC
AGCTGCACGACAGGGCTAGATCTCTGGTGGTGCCTGCCTACGCCTATAGAAAGCTGCACCCC
AAACAGCGGCCTATTCCTAGCGCCTTCTGCTTTCTGAGCCACGATCACGGCAGGACATGGGC
CAGAGGACATTTCGTGGCCCAGGACACACTGGCGAATCAGGTGGCCGAAGTGGAAACCGGCG
AGCAGAGAGTCGTGACCCTGAACGCCAGATCTCACCTGAGAGCCAGAGTGCAGGCCCAGAGC
ACAAACGACGGCCTGGATTTCCAAGAGAGCCAGCTGGTCAAGAAACTGGTGGAACCTCCTCC
ACAGGGCTGTCAGGGAAGCGTGATCAGCTTTCCATCTCCTAGAAGCGGCCCTGGCTCTCCTG
CTCAGTGGCTGCTGTATACACACCCCACACACAGCTGGCAGAGAGCCGATCTGGGCGCCTAC
CTGAATCCTAGACCTCCTGCTCCTGAGGCTTGGAGCGAACCTGTTCTGCTGGCCAAGGGCAG
CGCTGCCTACAGCGATCTGCAGTCTATGGGCACAGGCCCTGATGGCAGCCCTCTGTTTGGCT
GTCTGTACGAGGCCAACGACTACGAAGAGATCCGTTTCCGTATGTTCACCCTGAAGCAGGCC
TTTCCAGCCGAGTACCTGCCTCAAGGCGGAGGTGGAAGTGGCGGAGGCGGATCcGACAAAAC
TCACACATGCCCACCGTGCCCAGCACCTGAACTCCTGGGGGGACCGTCAGTCTTCCTCTTCC
CCCCAAAACCCAAGGACACCCTCATGATCTCCCGGACCCCTGAGGTCACATGCGTGGTGGTG
GACGTGAGCCACGAAGACCCTGAGGTCAAGTTCAACTGGTACGTGGACGGCGTGGAGGTGCA
TAATGCCAAGACAAAGCCGCGGGAGGAGCAGTACAACAGCACGTACCGTGTGGTCAGCGTCC
TCACCGTCCTGCACCAGGACTGGCTGAATGGCAAGGAGTACAAGTGCAAGGTCTCCAACAAA
GCCCTCCCAGCCCCCATCGAGAAAACCATCTCCAAAGCCAAAGGGCAGCCCCGAGAACCACA
GGTcTACACCCTGCCCCCATCCCGGGAGGAGATGACCAAGAACCAGGTCAGCCTGACCTGCC
TGGTCAAAGGCTTCTATCCCAGCGACATCGCCGTGGAGTGGGAGAGCAATGGGCAGCCGGAG
AACAACTACAAGACCACGCCTCCCGTGCTGGACTCCGACGGCTCCTTCTTCCTCacTAGCAA
GCTCACCGTGGACAAGAGCAGGTGGCAGCAGGGGAACGTCTTCTCATGCTCCGTGATGCATG
AGGCTCTGCACAACCACTACACGCAGAAGAGCCTCTCCCTGTCTCCGGGTAAA
SEQ ID NO: 177:
DASLPYLQKESVFQSGAHAYRIPALLYLPGQQSLLAFAEQRASKKDEHAELIVLRRGDYDAG
THQVQWQAQEVVAQARLDGHRSMNPCPLYDEQTGTLFLFFIAIPGQVTEQQQLQTRANVTRL
CQVTSTDHGRTWSSPRDLTDAAIGPAYREWSTFAVGPGHCLQLHDRARSLVVPAYAYRKLHP
KQRPIPSAFCFLSHDHGRTWARGHFVAQDTLECQVAEVETGEQRVVTLNARSHLRARVQAQS
TNDGLDFQESQLVKKLVEPPPQGCQGSVISFPSPRSGPGSPAQWLLYTHPTHARQRADLGAY
LNPRPPAPEAWSEPVLLAKGSAAYSDLQSMGTGPDGSPLFGCLYEANDYEEIVFLMFTLKQA
FPAEYLPQGGGGSGGGGSDKTHTCPPCPAPELLGGPSVFLFPPKPKDTLMISRTPEVTCVVV
DVSHEDPEVKFNWYVDGVEVHNAKTKPREEQYNSTYRVVSVLTVLHQDWLNGKEYKCKVSNK
ALPAPIEKTISKAKGQPREPQVYTLPPSREEMTKNQVSLTCLVKGFYPSDIAVEWESNGQPE
NNYKTTPPVLDSDGSFFLTSKLTVDKSRWQQGNVFSCSVMHEALHNHYTQKSLSLSPGK
SEQ ID NO: 178:
DASLPYLQKESVFQSGAHAYRIPALLYLPGQQSLLAFAEQRASKKDEHAELIVLRRGDYDAG
THQVQWQAQEVVAQARLDGHRSMNPCPLYDEQTGTLFLFFIAIPGQVTEQQQLQTRANVTRL
CQVTSTDHGRTWSSPRDLTDAAIGPAYREWSTFAVGPGHCLQLHDRARSLVVPAYAYRKLHP
KQRPIPSAFCFLSHDHGRTWARGHFVAQDTLECQVAEVETGEQRVVTLNARSHLRARVQAQS
TNDGLDFQESQLVKKLVEPPPQGCQGSVISFPSPRSGPGSPAQWLLYTHPTHARQRADLGAY
LNPRPPAPEAWSEPVLLAKGSAAYSDLQSMGTGPDGSPLFGCLYEANDYEEIVFLMFTLKQA
FPAEYLPQEPKSSDKTHTCPPCPAPELLGGPSVFLFPPKPKDTLMISRTPEVTCVVVDVSHE
DPEVKFNWYVDGVEVHNAKTKPREEQYNSTYRVVSVLTVLHQDWLNGKEYKCKVSNKALPAP
IEKTISKAKGQPREPQVYTLPPSREEMTKNQVSLTCLVKGFYPSDIAVEWESNGQPENNYKT
TPPVLDSDGSFFLTSKLTVDKSRWQQGNVFSCSVMHEALHNHYTQKSLSLSPGK
SEQ ID NO: 179:
DASLPYLQKESVFQSGAHAYRIPALLYLPGQQSLLAFAEQRASKKDEHAELIVLRRGDYDAG
THQVQWQAQEVVAQARLDGHRSMNPCPLYDEQTGTLFLFFIAIPGQVTEQQQLQTRANVTRL
CQVTSTDHGRTWSSPRDLTDAAIGPAYREWSTFAVGPGHCLQLHDRARSLVVPAYAYRKLHP
KQRPIPSAFCFLSHDHGRTWARGHFVAQDTLECQVAEVETGEQRVVTLNARSHLRARVQAQS
TNDGLDFQESQLVKKLVEPPPQGCQGSVISFPSPRSGPGSPAQWLLYTHPTHARQRADLGAY
LNPRPPAPEAWSEPVLLAKGSAAYSDLQSMGTGPDGSPLFGCLYEANDYEEIVFLMFTLKQA
FPAEYLPQGGGGSGGGGSDKTHTCPPCPAPELLGGPSVFLFPPKPKDTLMISRTPEVTCVVV
DVSHEDPEVKFNWYVDGVEVHNAKTKPREEQYNSTYRVVSVLTVLHQDWLNGKEYKCKVSNK
ALPAPIEKTISKAKGQPREPQVYTLPPSREEMTKNQVSLTCLVKGFYPSDIAVEWESNGQPE
NNYKTTPPVLDSDGSFFLYSKLTVDKSRWQQGNVFSCSVMHEALHNHYTQKSLSLSPGK
SEQ ID NO: 180:
DASLPYLQKESVFQSGAHAYRIPALLYLPGQQSLLAFAEQRASKKDEHAELIVLRRGDYDAG
THQVQWQAQEVVAQARLDGHRSMNPCPLYDEQTGTLFLFFIAIPGQVTEQQQLQTRANVTRL
CQVTSTDHGRTWSSPRDLTDAAIGPAYREWSTFAVGPGHCLQLHDRARSLVVPAYAYRKLHP
KQRPIPSAFCFLSHDHGRTWARGHFVAQDTLECQVAEVETGEQRVVTLNARSHLRARVQAQS
TNDGLDFQESQLVKKLVEPPPQGCQGSVISFPSPRSGPGSPAQWLLYTHPTHARQRADLGAY
LNPRPPAPEAWSEPVLLAKGSAAYSDLQSMGTGPDGSPLFGCLYEANDYEEIVFLMFTLKQA
FPAEYLPQEPKSSDKTHTCPPCPAPELLGGPSVFLFPPKPKDTLMISRTPEVTCVVVDVSHE
DPEVKFNWYVDGVEVHNAKTKPREEQYNSTYRVVSVLTVLHQDWLNGKEYKCKVSNKALPAP
IEKTISKAKGQPREPQVYTLPPSREEMTKNQVSLTCLVKGFYPSDIAVEWESNGQPENNYKT
TPPVLDSDGSFFLYSKLTVDKSRWQQGNVFSCSVMHEALHNHYTQKSLSLSPGK
SEQ ID NO: 181:
DASLPYLQKESVFQSGAHAYRIPALLYLPGQQSLLAFAEQRASKKDEHAELIVLRRGDYDAG
THQVQWQAQEVVAQARLDGHRSMNPCPLYDEQTGTLFLFFIAIPGQVTEQQQLQTRANVTRL
CYVTSTDHGRTWSSPRDLTDAAIGPAYREWSTFAVGPGHCLQLHDRARSLVVPAYAYRKLHP
KQRPIPSAFCFLSHDHGRTWARGHFVAQDTLECQVAEVETGEQRVVTLNARSHLRARVQAQS
TNDGLDFQESQLVKKLVEPPPTGCQGSVISFPSPRSGPGSPAQWLLYTHPTHSWQRADLGAY
LNPRPPAPEAWSEPVLLAKGSAAYSDLQSMGTGPDGSPLFGCLYEANDYEEIVFLMFTLKQA
FPAEYLPQGGGGSGGGGSDKTHTCPPCPAPELLGGPSVFLFPPKPKDTLMISRTPEVTCVVV
DVSHEDPEVKFNWYVDGVEVHNAKTKPREEQYNSTYRVVSVLTVLHQDWLNGKEYKCKVSNK
ALPAPIEKTISKAKGQPREPQVYTLPPSREEMTKNQVSLTCLVKGFYPSDIAVEWESNGQPE
NNYKTTPPVLDSDGSFFLTSKLTVDKSRWQQGNVFSCSVMHEALHNHYTQKSLSLSPGK
SEQ ID NO: 182:
DASLPYLQKESVFQSGAHAYRIPALLYLPGQQSLLAFAEQRASKKDEHAELIVLRRGDYDAG
THQVQWQAQEVVAQARLDGHRSMNPCPLYDEQTGTLFLFFIAIPGQVTEQQQLQTRANVTRL
CYVTSTDHGRTWSSPRDLTDAAIGPAYREWSTFAVGPGHCLQLHDRARSLVVPAYAYRKLHP
KQRPIPSAFCFLSHDHGRTWARGHFVAQDTLECQVAEVETGEQRVVTLNARSHLRARVQAQS
TNDGLDFQESQLVKKLVEPPPTGCQGSVISFPSPRSGPGSPAQWLLYTHPTHSWQRADLGAY
LNPRPPAPEAWSEPVLLAKGSAAYSDLQSMGTGPDGSPLFGCLYEANDYEEIVFLMFTLKQA
FPAEYLPQEPKSSDKTHTCPPCPAPELLGGPSVFLFPPKPKDTLMISRTPEVTCVVVDVSHE
DPEVKFNWYVDGVEVHNAKTKPREEQYNSTYRVVSVLTVLHQDWLNGKEYKCKVSNKALPAP
IEKTISKAKGQPREPQVYTLPPSREEMTKNQVSLTCLVKGFYPSDIAVEWESNGQPENNYKT
TPPVLDSDGSFFLTSKLTVDKSRWQQGNVFSCSVMHEALHNHYTQKSLSLSPGK
SEQ ID NO: 183:
DASLPYLQKESVFQSGAHAYRIPALLYLPGQQSLLAFAEQRASKKDEHAELIVLRRGDYDAG
THQVQWQAQEVVAQARLDGHRSMNPCPLYDEQTGTLFLFFIAIPGQVTEQQQLQTRANVTRL
CYVTSTDHGRTWSSPRDLTDAAIGPAYREWSTFAVGPGHCLQLHDRARSLVVPAYAYRKLHP
KQRPIPSAFCFLSHDHGRTWARGHFVAQDTLECQVAEVETGEQRVVTLNARSHLRARVQAQS
TNDGLDFQESQLVKKLVEPPPTGCQGSVISFPSPRSGPGSPAQWLLYTHPTHSWQRADLGAY
LNPRPPAPEAWSEPVLLAKGSAAYSDLQSMGTGPDGSPLFGCLYEANDYEEIVFLMFTLKQA
FPAEYLPQGGGGSGGGGSDKTHTCPPCPAPELLGGPSVFLFPPKPKDTLMISRTPEVTCVVV
DVSHEDPEVKFNWYVDGVEVHNAKTKPREEQYNSTYRVVSVLTVLHQDWLNGKEYKCKVSNK
ALPAPIEKTISKAKGQPREPQVYTLPPSREEMTKNQVSLTCLVKGFYPSDIAVEWESNGQPE
NNYKTTPPVLDSDGSFFLYSKLTVDKSRWQQGNVFSCSVMHEALHNHYTQKSLSLSPGK
SEQ ID NO: 184:
DASLPYLQKESVFQSGAHAYRIPALLYLPGQQSLLAFAEQRASKKDEHAELIVLRRGDYDAG
THQVQWQAQEVVAQARLDGHRSMNPCPLYDEQTGTLFLFFIAIPGQVTEQQQLQTRANVTRL
CYVTSTDHGRTWSSPRDLTDAAIGPAYREWSTFAVGPGHCLQLHDRARSLVVPAYAYRKLHP
KQRPIPSAFCFLSHDHGRTWARGHFVAQDTLECQVAEVETGEQRVVTLNARSHLRARVQAQS
TNDGLDFQESQLVKKLVEPPPTGCQGSVISFPSPRSGPGSPAQWLLYTHPTHSWQRADLGAY
LNPRPPAPEAWSEPVLLAKGSAAYSDLQSMGTGPDGSPLFGCLYEANDYEEIVFLMFTLKQA
FPAEYLPQEPKSSDKTHTCPPCPAPELLGGPSVFLFPPKPKDTLMISRTPEVTCVVVDVSHE
DPEVKFNWYVDGVEVHNAKTKPREEQYNSTYRVVSVLTVLHQDWLNGKEYKCKVSNKALPAP
IEKTISKAKGQPREPQVYTLPPSREEMTKNQVSLTCLVKGFYPSDIAVEWESNGQPENNYKT
TPPVLDSDGSFFLYSKLTVDKSRWQQGNVFSCSVMHEALHNHYTQKSLSLSPGK
SEQ ID NO: 185:
DASLPYLQKESVFQSGAHAYRIPALLYLPGQQSLLAFAEQRASKKDEHAELIVLRRGDYDAG
THQVQWQAQEVVAQARLDGHRSMNPCPLYDEQTGTLFLFFIAIPGQVTEQQQLQTRANVTRL
CYVTSTDHGRTWSSPRDLTDAAIGPAYREWSTFAVGPGHCLQLHDRARSLVVPAYAYRKLHP
KQRPIPSAFCFLSHDHGRTWARGHFVAQDTLECQVAEVETGEQRVVTLNARSHLRFRVQAQS
TNDGLDFQESQLVKKLVEPPPTGCQGSVISFPSPRSGPGSPAQWLLYTHPTHSWQRADLGAY
LNPRPPAPEAWSEPVLLAKGSAAYSDLQSMGTGPDGSPLFGCLYEANDYEEIVFLMFTLKQA
FPAEYLPQGGGGSGGGGSDKTHTCPPCPAPELLGGPSVFLFPPKPKDTLMISRTPEVTCVVV
DVSHEDPEVKFNWYVDGVEVHNAKTKPREEQYNSTYRVVSVLTVLHQDWLNGKEYKCKVSNK
ALPAPIEKTISKAKGQPREPQVYTLPPSREEMTKNQVSLTCLVKGFYPSDIAVEWESNGQPE
NNYKTTPPVLDSDGSFFLTSKLTVDKSRWQQGNVFSCSVMHEALHNHYTQKSLSLSPGK
SEQ ID NO: 186:
DASLPYLQKESVFQSGAHAYRIPALLYLPGQQSLLAFAEQRASKKDEHAELIVLRRGDYDAG
THQVQWQAQEVVAQARLDGHRSMNPCPLYDEQTGTLFLFFIAIPGQVTEQQQLQTRANVTRL
CYVTSTDHGRTWSSPRDLTDAAIGPAYREWSTFAVGPGHCLQLHDRARSLVVPAYAYRKLHP
KQRPIPSAFCFLSHDHGRTWARGHFVAQDTLECQVAEVETGEQRVVTLNARSHLRFRVQAQS
TNDGLDFQESQLVKKLVEPPPTGCQGSVISFPSPRSGPGSPAQWLLYTHPTHSWQRADLGAY
LNPRPPAPEAWSEPVLLAKGSAAYSDLQSMGTGPDGSPLFGCLYEANDYEEIVFLMFTLKQA
FPAEYLPQEPKSSDKTHTCPPCPAPELLGGPSVFLFPPKPKDTLMISRTPEVTCVVVDVSHE
DPEVKFNWYVDGVEVHNAKTKPREEQYNSTYRVVSVLTVLHQDWLNGKEYKCKVSNKALPAP
IEKTISKAKGQPREPQVYTLPPSREEMTKNQVSLTCLVKGFYPSDIAVEWESNGQPENNYKT
TPPVLDSDGSFFLTSKLTVDKSRWQQGNVFSCSVMHEALHNHYTQKSLSLSPGK
SEQ ID NO: 187:
DASLPYLQKESVFQSGAHAYRIPALLYLPGQQSLLAFAEQRASKKDEHAELIVLRRGDYDAG
THQVQWQAQEVVAQARLDGHRSMNPCPLYDEQTGTLFLFFIAIPGQVTEQQQLQTRANVTRL
CYVTSTDHGRTWSSPRDLTDAAIGPAYREWSTFAVGPGHCLQLHDRARSLVVPAYAYRKLHP
KQRPIPSAFCFLSHDHGRTWARGHFVAQDTLECQVAEVETGEQRVVTLNARSHLRFRVQAQS
TNDGLDFQESQLVKKLVEPPPTGCQGSVISFPSPRSGPGSPAQWLLYTHPTHSWQRADLGAY
LNPRPPAPEAWSEPVLLAKGSAAYSDLQSMGTGPDGSPLFGCLYEANDYEEIVFLMFTLKQA
FPAEYLPQGGGGSGGGGSDKTHTCPPCPAPELLGGPSVFLFPPKPKDTLMISRTPEVTCVVV
DVSHEDPEVKFNWYVDGVEVHNAKTKPREEQYNSTYRVVSVLTVLHQDWLNGKEYKCKVSNK
ALPAPIEKTISKAKGQPREPQVYTLPPSREEMTKNQVSLTCLVKGFYPSDIAVEWESNGQPE
NNYKTTPPVLDSDGSFFLYSKLTVDKSRWQQGNVFSCSVMHEALHNHYTQKSLSLSPGK
SEQ ID NO: 188:
DASLPYLQKESVFQSGAHAYRIPALLYLPGQQSLLAFAEQRASKKDEHAELIVLRRGDYDAG
THQVQWQAQEVVAQARLDGHRSMNPCPLYDEQTGTLFLFFIAIPGQVTEQQQLQTRANVTRL
CYVTSTDHGRTWSSPRDLTDAAIGPAYREWSTFAVGPGHCLQLHDRARSLVVPAYAYRKLHP
KQRPIPSAFCFLSHDHGRTWARGHFVAQDTLECQVAEVETGEQRVVTLNARSHLRFRVQAQS
TNDGLDFQESQLVKKLVEPPPTGCQGSVISFPSPRSGPGSPAQWLLYTHPTHSWQRADLGAY
LNPRPPAPEAWSEPVLLAKGSAAYSDLQSMGTGPDGSPLFGCLYEANDYEEIVFLMFTLKQA
FPAEYLPQEPKSSDKTHTCPPCPAPELLGGPSVFLFPPKPKDTLMISRTPEVTCVVVDVSHE
DPEVKFNWYVDGVEVHNAKTKPREEQYNSTYRVVSVLTVLHQDWLNGKEYKCKVSNKALPAP
IEKTISKAKGQPREPQVYTLPPSREEMTKNQVSLTCLVKGFYPSDIAVEWESNGQPENNYKT
TPPVLDSDGSFFLYSKLTVDKSRWQQGNVFSCSVMHEALHNHYTQKSLSLSPGK
SEQ ID NO: 189:
DASLPYLQKESVFQSGAHAYRIPALLYLPGQQSLLAFAEQRASKKDEHAELIVLRRGDYDAG
THQVQWQAQEVVAQARLDGHRSMNPCPLYDEQTGTLFLFFIAIPGQVTEQQQLQTRANVTRL
CYVTSTDHGRTWSSPRDLTDAAIGPAYREWSTFAVGPGHCLQLHDRARSLVVPAYAYRKLHP
KQRPIPSAFCFLSHDHGRTWARGHFVAQDTLECQVAEVETGEQRVVTLNARSHLRARVQAQS
TNDGLDFQESQLVKKLVEPPPTGCQGSVISFPSPRSGPGSPAQWLLYTHPTHSWQRADLGAY
LNPRPPAPEAWSEPVLLAKGSAAYSDLQSMGTGPDGSPLFGCLYEANDYEEIVFLMFTLKQA
FPAEYLPQEPKSSDKTHTCPPCPAPELLGGPSVFLFPPKPKDTLMISRTPEVTCVVVDVSHE
DPEVKENWYVDGVEVHNAKTKPREEQYNSTYRVVSVLTVLHQDWLNGKEYKCKVSNKALPAP
IEKTISKAKGQPREPQVYTLPPSREEMTKNQVSLYCLVKGFYPSDIAVEWESNGQPENNYKT
TPPVLDSDGSFFLYSKLTVDKSRWQQGNVFSCSVMHEALHNHYTOKSLSLSPGK
SEQ ID NO: 190:
gatGCATCTCTGCCTTACCTGCAGAAAGAAAGCGTGTTCCAGTCTGGCGCCCACGCCTACAG
AATTCCCGCTCTGCTGTATCTGCCAGGCCAGCAGTCTCTGCTGGCTTTCGCTGAACAGCGGG
CCAGCAAGAAGGATGAGCACGCCGAACTGATCGTGCTGCGGAGAGGCGATTACGACGCCggc
ACACATCAGGTGCAGTGGCAGGCTCAAGAGGTGGTGGCTCAGGCTAGACTGGACGGCCACAG
ATCTATGAACCCCTGTCCTCTGTACGATgaaCAGACCGGCACACTGTTTCTGTTCTTTATCG
CTATCCCCGGCCAAGTGACCGAGCAGCAGCAGCTGCAGACAAGAGCCAACGTGACCAGACTG
TGTtacGTGACCTCCACCGACCACGGCAGAACCTGGTCTAGCCCTAGAGATCTGACCGACGC
CGCCATCGGACCTGCCTATAGAGAGTGGTCCACCTTCGCCGTTGGACCTGGACACTGTCTCC
AGCTGCACGACAGGGCTAGATCTCTGGTGGTGCCTGCCTACGCCTATAGAAAGCTGCACCCC
AAACAGCGGCCTATTCCTAGCGCCTTCTGCTTTCTGAGCCACGATCACGGCAGGACATGGGC
CAGAGGACATTTCGTGGCCCAGGACACACTGGAATGCCAGGTGGCCGAAGTGGAAACCGGCG
AGCAGAGAGTCGTGACCCTGAACGCCAGATCTCACCTGAGAGCCAGAGTGCAGGCCCAGAGC
ACAAACGACGGCCTGGATTTCCAAGAGAGCCAGCTGGTCAAGAAACTGGTGGAACCTCCTCC
AaccGGCTGTCAGGGAAGCGTGATCAGCTTTCCATCTCCTAGAAGCGGCCCTGGCTCTCCTG
CTCAGTGGCTGCTGTATACACACCCCACACACAGCTGGCAGAGAGCCGATCTGGGCGCCTAC
CTGAATCCTAGACCTCCTGCTCCTGAGGCTTGGAGCGAACCTGTTCTGCTGGCCAAGGGCAG
CgctGCCTACAGCGATCTGCAGTCTATGGGCACAGGCCCTGATGGCAGCCCTCTGTTTGGCT
GTCTGTACGAGGCCAACGACTACGAAGAGATCGTGTTCCTGATGTTCACCCTGAAGCAGGCC
TTTCCAGCCGAGTACCTGCCTCAAGAGCCCAAATCTTCTGACAAAACTCACACATGCCCACC
GTGCCCAGCACCTGAACTCCTGGGGGGACCGTCAGTCTTCCTCTTCCCCCCAAAACCCAAGG
ACACCCTCATGATCTCCCGGACCCCTGAGGTCACATGCGTGGTGGTGGACGTGAGCCACGAA
GACCCTGAGGTCAAGTTCAACTGGTACGTGGACGGCGTGGAGGTGCATAATGCCAAGACAAA
GCCGCGGGAGGAGCAGTACAACAGCACGTACCGTGTGGTCAGCGTCCTCACCGTCCTGCACC
AGGACTGGCTGAATGGCAAGGAGTACAAGTGCAAGGTCTCCAACAAAGCCCTCCCAGCCCCC
ATCGAGAAAACCATCTCCAAAGCCAAAGGGCAGCCCCGAGAACCACAGGTcTACACCCTGCC
CCCATCCCGGGAGGAGATGACCAAGAACCAGGTCAGCCTGtaCTGCCTGGTCAAAGGCTTCT
ATCCCAGCGACATCGCCGTGGAGTGGGAGAGCAATGGGCAGCCGGAGAACAACTACAAGACC
ACGCCTCCCGTGCTGGACTCCGACGGCTCCTTCTTCCTCtatAGCAAGCTCACCGTGGACAA
GAGCAGGTGGCAGCAGGGGAACGTCTTCTCATGCTCCGTGATGCATGAGGCTCTGCACAACC
ACTACACGCAGAAGAGCCTCTCCCTGTCTCCGGGTAAA
SEQ ID NO: 191:
DASLPYLQKESVFQSGAHAYRIPALLYLPGQQSLLAFAEQRASKKDEHAELIVLRRGDYDAG
THQVQWQAQEVVAQARLDGHRSMNPCPLYDEQTGTLFLFFIAIPGQVTEQQQLQTRANVTRL
CYVTSTDHGRTWSSPRDLTDAAIGPAYREWSTFAVGPGHCLQLHDRARSLVVPAYAYRKLHP
KQRPIPSAFCFLSHDHGRTWARGHFVAQDTLECQVAEVETGEQRVVTLNARSHLRFRVQAQS
TNDGLDFQESQLVKKLVEPPPTGCQGSVISFPSPRSGPGSPAQWLLYTHPTHSWQRADLGAY
LNPRPPAPEAWSEPVLLAKGSAAYSDLQSMGTGPDGSPLFGCLYEANDYEEIVFLMFTLKQA
FPAEYLPQEPKSSDKTHTCPPCPAPELLGGPSVFLFPPKPKDTLMISRTPEVTCVVVDVSHE
DPEVKFNWYVDGVEVHNAKTKPREEQYNSTYRVVSVLTVLHQDWLNGKEYKCKVSNKALPAP
IEKTISKAKGQPREPQVYTLPPSREEMTKNQVSLYCLVKGFYPSDIAVEWESNGQPENNYKT
TPPVLDSDGSFFLYSKLTVDKSRWQQGNVFSCSVMHEALHNHYTQKSLSLSPGK
SEQ ID NO: 192:
gatGCATCTCTGCCTTACCTGCAGAAAGAAAGCGTGTTCCAGTCTGGCGCCCACGCCTACAG
AATTCCCGCTCTGCTGTATCTGCCAGGCCAGCAGTCTCTGCTGGCTTTCGCTGAACAGCGGG
CCAGCAAGAAGGATGAGCACGCCGAACTGATCGTGCTGCGGAGAGGCGATTACGACGCCggc
ACACATCAGGTGCAGTGGCAGGCTCAAGAGGTGGTGGCTCAGGCTAGACTGGACGGCCACAG
ATCTATGAACCCCTGTCCTCTGTACGATgaaCAGACCGGCACACTGTTTCTGTTCTTTATCG
CTATCCCCGGCCAAGTGACCGAGCAGCAGCAGCTGCAGACAAGAGCCAACGTGACCAGACTG
TGTtacGTGACCTCCACCGACCACGGCAGAACCTGGTCTAGCCCTAGAGATCTGACCGACGC
CGCCATCGGACCTGCCTATAGAGAGTGGTCCACCTTCGCCGTTGGACCTGGACACTGTCTCC
AGCTGCACGACAGGGCTAGATCTCTGGTGGTGCCTGCCTACGCCTATAGAAAGCTGCACCCC
AAACAGCGGCCTATTCCTAGCGCCTTCTGCTTTCTGAGCCACGATCACGGCAGGACATGGGC
CAGAGGACATTTCGTGGCCCAGGACACACTGGAATGCCAGGTGGCCGAAGTGGAAACCGGCG
AGCAGAGAGTCGTGACCCTGAACGCCAGATCTCACCTGAGAttCAGAGTGCAGGCCCAGAGC
ACAAACGACGGCCTGGATTTCCAAGAGAGCCAGCTGGTCAAGAAACTGGTGGAACCTCCTCC
AaccGGCTGTCAGGGAAGCGTGATCAGCTTTCCATCTCCTAGAAGCGGCCCTGGCTCTCCTG
CTCAGTGGCTGCTGTATACACACCCCACACACAGCTGGCAGAGAGCCGATCTGGGCGCCTAC
CTGAATCCTAGACCTCCTGCTCCTGAGGCTTGGAGCGAACCTGTTCTGCTGGCCAAGGGCAG
CgctGCCTACAGCGATCTGCAGTCTATGGGCACAGGCCCTGATGGCAGCCCTCTGTTTGGCT
GTCTGTACGAGGCCAACGACTACGAAGAGATCGTGTTCCTGATGTTCACCCTGAAGCAGGCC
TTTCCAGCCGAGTACCTGCCTCAAGAGCCCAAATCTTCTGACAAAACTCACACATGCCCACC
GTGCCCAGCACCTGAACTCCTGGGGGGACCGTCAGTCTTCCTCTTCCCCCCAAAACCCAAGG
ACACCCTCATGATCTCCCGGACCCCTGAGGTCACATGCGTGGTGGTGGACGTGAGCCACGAA
GACCCTGAGGTCAAGTTCAACTGGTACGTGGACGGCGTGGAGGTGCATAATGCCAAGACAAA
GCCGCGGGAGGAGCAGTACAACAGCACGTACCGTGTGGTCAGCGTCCTCACCGTCCTGCACC
AGGACTGGCTGAATGGCAAGGAGTACAAGTGCAAGGTCTCCAACAAAGCCCTCCCAGCCCCC
ATCGAGAAAACCATCTCCAAAGCCAAAGGGCAGCCCCGAGAACCACAGGTcTACACCCTGCC
CCCATCCCGGGAGGAGATGACCAAGAACCAGGTCAGCCTGtaCTGCCTGGTCAAAGGCTTCT
ATCCCAGCGACATCGCCGTGGAGTGGGAGAGCAATGGGCAGCCGGAGAACAACTACAAGACC
ACGCCTCCCGTGCTGGACTCCGACGGCTCCTTCTTCCTCtatAGCAAGCTCACCGTGGACAA
GAGCAGGTGGCAGCAGGGGAACGTCTTCTCATGCTCCGTGATGCATGAGGCTCTGCACAACC
ACTACACGCAGAAGAGCCTCTCCCTGTCTCCGGGTAAA
SEQ ID NO: 193:
gatGCATCTCTGCCTTACCTGCAGAAAGAAAGCGTGTTCCAGTCTGGCGCCCACGCCTACAG
AATTCCCGCTCTGCTGTATCTGCCAGGCCAGCAGTCTCTGCTGGCTTTCGCTGAACAGCGGG
CCAGCAAGAAGGATGAGCACGCCGAACTGATCGTGCTGCGGAGAGGCGATTACGACGCCggc
ACACATCAGGTGCAGTGGCAGGCTCAAGAGGTGGTGGCTCAGGCTAGACTGGACGGCCACAG
ATCTATGAACCCCTGTCCTCTGTACGATgaaCAGACCGGCACACTGTTTCTGTTCTTTATCG
CTATCCCCGGCCAAGTGACCGAGCAGCAGCAGCTGCAGACAAGAGCCAACGTGACCAGACTG
TGTCAAGTGACCTCCACCGACCACGGCAGAACCTGGTCTAGCCCTAGAGATCTGACCGACGC
CGCCATCGGACCTGCCTATAGAGAGTGGTCCACCTTCGCCGTTGGACCTGGACACTGTCTCC
AGCTGCACGACAGGGCTAGATCTCTGGTGGTGCCTGCCTACGCCTATAGAAAGCTGCACCCC
AAACAGCGGCCTATTCCTAGCGCCTTCTGCTTTCTGAGCCACGATCACGGCAGGACATGGGC
CAGAGGACATTTCGTGGCCCAGGACACACTGGAATGCCAGGTGGCCGAAGTGGAAACCGGCG
AGCAGAGAGTCGTGACCCTGAACGCCAGATCTCACCTGAGAGCCAGAGTGCAGGCCCAGAGC
ACAAACGACGGCCTGGATTTCCAAGAGAGCCAGCTGGTCAAGAAACTGGTGGAACCTCCTCC
ACAGGGCTGTCAGGGAAGCGTGATCAGCTTTCCATCTCCTAGAAGCGGCCCTGGCTCTCCTG
CTCAGTGGCTGCTGTATACACACCCCACACACAGCTGGCAGAGAGCCGATCTGGGCGCCTAC
CTGAATCCTAGACCTCCTGCTCCTGAGGCTTGGAGCGAACCTGTTCTGCTGGCCAAGGGCAG
CgctGCCTACAGCGATCTGCAGTCTATGGGCACAGGCCCTGATGGCAGCCCTCTGTTTGGCT
GTCTGTACGAGGCCAACGACTACGAAGAGATCGTGTTCCTGATGTTCACCCTGAAGCAGGCC
TTTCCAGCCGAGTACCTGCCTCAAGAGCCCAAATCTTCTGACAAAACTCACACATGCCCACC
GTGCCCAGCACCTGAACTCCTGGGGGGACCGTCAGTCTTCCTCTTCCCCCCAAAACCCAAGG
ACACCCTCATGATCTCCCGGACCCCTGAGGTCACATGCGTGGTGGTGGACGTGAGCCACGAA
GACCCTGAGGTCAAGTTCAACTGGTACGTGGACGGCGTGGAGGTGCATAATGCCAAGACAAA
GCCGCGGGAGGAGCAGTACAACAGCACGTACCGTGTGGTCAGCGTCCTCACCGTCCTGCACC
AGGACTGGCTGAATGGCAAGGAGTACAAGTGCAAGGTCTCCAACAAAGCCCTCCCAGCCCCC
ATCGAGAAAACCATCTCCAAAGCCAAAGGGCAGCCCCGAGAACCACAGGTcTACACCCTGCC
CCCATCCCGGGAGGAGATGACCAAGAACCAGGTCAGCCTGACCTGCCTGGTCAAAGGCTTCT
ATCCCAGCGACATCGCCGTGGAGTGGGAGAGCAATGGGCAGCCGGAGAACAACTACAAGACC
ACGCCTCCCGTGCTGGACTCCGACGGCTCCTTCTTCCTCtatAGCAAGCTCACCGTGGACAA
GAGCAGGTGGCAGCAGGGGAACGTCTTCTCATGCTCCGTGATGCATGAGGCTCTGCACAACC
ACTACACGCAGAAGAGCCTCTCCCTGTCTCCGGGTAAA
SEQ ID NO: 194:
gatGCATCTCTGCCTTACCTGCAGAAAGAAAGCGTGTTCCAGTCTGGCGCCCACGCCTACAG
AATTCCCGCTCTGCTGTATCTGCCAGGCCAGCAGTCTCTGCTGGCTTTCGCTGAACAGCGGG
CCAGCAAGAAGGATGAGCACGCCGAACTGATCGTGCTGCGGAGAGGCGATTACGACGCCggc
ACACATCAGGTGCAGTGGCAGGCTCAAGAGGTGGTGGCTCAGGCTAGACTGGACGGCCACAG
ATCTATGAACCCCTGTCCTCTGTACGATgaaCAGACCGGCACACTGTTTCTGTTCTTTATCG
CTATCCCCGGCCAAGTGACCGAGCAGCAGCAGCTGCAGACAAGAGCCAACGTGACCAGACTG
TGTtacGTGACCTCCACCGACCACGGCAGAACCTGGTCTAGCCCTAGAGATCTGACCGACGC
CGCCATCGGACCTGCCTATAGAGAGTGGTCCACCTTCGCCGTTGGACCTGGACACTGTCTCC
AGCTGCACGACAGGGCTAGATCTCTGGTGGTGCCTGCCTACGCCTATAGAAAGCTGCACCCC
AAACAGCGGCCTATTCCTAGCGCCTTCTGCTTTCTGAGCCACGATCACGGCAGGACATGGGC
CAGAGGACATTTCGTGGCCCAGGACACACTGGAATGCCAGGTGGCCGAAGTGGAAACCGGCG
AGCAGAGAGTCGTGACCCTGAACGCCAGATCTCACCTGAGAGCCAGAGTGCAGGCCCAGAGC
ACAAACGACGGCCTGGATTTCCAAGAGAGCCAGCTGGTCAAGAAACTGGTGGAACCTCCTCC
AaccGGCTGTCAGGGAAGCGTGATCAGCTTTCCATCTCCTAGAAGCGGCCCTGGCTCTCCTG
CTCAGTGGCTGCTGTATACACACCCCACACACAGCTGGCAGAGAGCCGATCTGGGCGCCTAC
CTGAATCCTAGACCTCCTGCTCCTGAGGCTTGGAGCGAACCTGTTCTGCTGGCCAAGGGCAG
CgctGCCTACAGCGATCTGCAGTCTATGGGCACAGGCCCTGATGGCAGCCCTCTGTTTGGCT
GTCTGTACGAGGCCAACGACTACGAAGAGATCGTGTTCCTGATGTTCACCCTGAAGCAGGCC
TTTCCAGCCGAGTACCTGCCTCAAGAGCCCAAATCTTCTGACAAAACTCACACATGCCCACC
GTGCCCAGCACCTGAACTCCTGGGGGGACCGTCAGTCTTCCTCTTCCCCCCAAAACCCAAGG
ACACCCTCATGATCTCCCGGACCCCTGAGGTCACATGCGTGGTGGTGGACGTGAGCCACGAA
GACCCTGAGGTCAAGTTCAACTGGTACGTGGACGGCGTGGAGGTGCATAATGCCAAGACAAA
GCCGCGGGAGGAGCAGTACAACAGCACGTACCGTGTGGTCAGCGTCCTCACCGTCCTGCACC
AGGACTGGCTGAATGGCAAGGAGTACAAGTGCAAGGTCTCCAACAAAGCCCTCCCAGCCCCC
ATCGAGAAAACCATCTCCAAAGCCAAAGGGCAGCCCCGAGAACCACAGGTcTACACCCTGCC
CCCATCCCGGGAGGAGATGACCAAGAACCAGGTCAGCCTGACCTGCCTGGTCAAAGGCTTCT
ATCCCAGCGACATCGCCGTGGAGTGGGAGAGCAATGGGCAGCCGGAGAACAACTACAAGACC
ACGCCTCCCGTGCTGGACTCCGACGGCTCCTTCTTCCTCtatAGCAAGCTCACCGTGGACAA
GAGCAGGTGGCAGCAGGGGAACGTCTTCTCATGCTCCGTGATGCATGAGGCTCTGCACAACC
ACTACACGCAGAAGAGCCTCTCCCTGTCTCCGGGTAAA
SEQ ID NO: 195:
GATGCATCTCTGCCTTACCTGCAGAAAGAAAGCGTGTTCCAGTCTGGCGCCCACGCCTACAG
AATTCCCGCTCTGCTGTATCTGCCAGGCCAGCAGTCTCTGCTGGCTTTCGCTGAACAGCGGG
CCAGCAAGAAGGATGAGCACGCCGAACTGATCGTGCTGCGGAGAGGCGATTACGACGCCGGC
ACACATCAGGTGCAGTGGCAGGCTCAAGAGGTGGTGGCTCAGGCTAGACTGGACGGCCACAG
ATCTATGAACCCCTGTCCTCTGTACGATGAACAGACCGGCACACTGTTTCTGTTCTTTATCG
CTATCCCCGGCCAAGTGACCGAGCAGCAGCAGCTGCAGACAAGAGCCAACGTGACCAGACTG
TGTTACGTGACCTCCACCGACCACGGCAGAACCTGGTCTAGCCCTAGAGATCTGACCGACGC
CGCCATCGGACCTGCCTATAGAGAGTGGTCCACCTTCGCCGTTGGACCTGGACACTGTCTCC
AGCTGCACGACAGGGCTAGATCTCTGGTGGTGCCTGCCTACGCCTATAGAAAGCTGCACCCC
AAACAGCGGCCTATTCCTAGCGCCTTCTGCTTTCTGAGCCACGATCACGGCAGGACATGGGC
CAGAGGACATTTCGTGGCCCAGGACACACTGGAATGCCAGGTGGCCGAAGTGGAAACCGGCG
AGCAGAGAGTCGTGACCCTGAACGCCAGATCTCACCTGAGATTCAGAGTGCAGGCCCAGAGC
ACAAACGACGGCCTGGATTTCCAAGAGAGCCAGCTGGTCAAGAAACTGGTGGAACCTCCTCC
AACCGGCTGTCAGGGAAGCGTGATCAGCTTTCCATCTCCTAGAAGCGGCCCTGGCTCTCCTG
CTCAGTGGCTGCTGTATACACACCCCACACACAGCTGGCAGAGAGCCGATCTGGGCGCCTAC
CTGAATCCTAGACCTCCTGCTCCTGAGGCTTGGAGCGAACCTGTTCTGCTGGCCAAGGGCAG
CGCTGCCTACAGCGATCTGCAGTCTATGGGCACAGGCCCTGATGGCAGCCCTCTGTTTGGCT
GTCTGTACGAGGCCAACGACTACGAAGAGATCGTGTTCCTGATGTTCACCCTGAAGCAGGCC
TTTCCAGCCGAGTACCTGCCTCAAGAGCCCAAATCTTCTGACAAAACTCACACATGCCCACC
GTGCCCAGCACCTGAACTCCTGGGGGGACCGTCAGTCTTCCTCTTCCCCCCAAAACCCAAGG
ACACCCTCATGATCTCCCGGACCCCTGAGGTCACATGCGTGGTGGTGGACGTGAGCCACGAA
GACCCTGAGGTCAAGTTCAACTGGTACGTGGACGGCGTGGAGGTGCATAATGCCAAGACAAA
GCCGCGGGAGGAGCAGTACAACAGCACGTACCGTGTGGTCAGCGTCCTCACCGTCCTGCACC
AGGACTGGCTGAATGGCAAGGAGTACAAGTGCAAGGTCTCCAACAAAGCCCTCCCAGCCCCC
ATCGAGAAAACCATCTCCAAAGCCAAAGGGCAGCCCCGAGAACCACAGGTCTACACCCTGCC
CCCATCCCGGGAGGAGATGACCAAGAACCAGGTCAGCCTGACCTGCCTGGTCAAAGGCTTCT
ATCCCAGCGACATCGCCGTGGAGTGGGAGAGCAATGGGCAGCCGGAGAACAACTACAAGACC
ACGCCTCCCGTGCTGGACTCCGACGGCTCCTTCTTCCTCTATAGCAAGCTCACCGTGGACAA
GAGCAGGTGGCAGCAGGGGAACGTCTTCTCATGCTCCGTGATGCATGAGGCTCTGCACAACC
ACTACACGCAGAAGAGCCTCTCCCTGTCTCCGGGTAAA
SEQ ID NO: 196:
DASLPYLQKESVFQSGAHAYRIPALLYLPGQQSLLAFAEQRASKKDEHAELIVLRRGDYDAG
THQVQWQAQEVVAQARLDGHRSMNPCPLYDEQTGTLFLFFIAIPGQVTEQQQLQTRANVTRL
CYVTSTDHGRTWSSPRDLTDAAIGPAYREWSTFAVGPGHCLQLHDRARSLVVPAYAYRKLHP
KQRPIPSAFCFLSHDHGRTWARGHFVAQDTLECQVAEVETGEQRVVTLNARSHLRARVQAQS
TNDGLDFQESQLVKKLVEPPPQGCQGSVISFPSPRSGPGSPAQWLLYTHPTHSWQRADLGAY
LNPRPPAPEAWSEPVLLAKGSAAYSDLQSMGTGPDGSPLFGCLYEANDYEEIVFLMFTLKQA
FPAEYLPQ
SEQ ID NO: 197:
DASLPYLQKESVFQSGAHAYRIPALLYLPGQQSLLAFAEQRASKKDEHAELIVLRRGDYDAG
THQVQWQAQEVVAQARLDGHRSMNPCPLYDEQTGTLFLFFIAIPGQVTEQQQLQTRANVTRL
CYVTSTDHGRTWSSPRDLTDAAIGPAYREWSTFAVGPGHCLQLHDRARSLVVPAYAYRKLHP
KQRPIPSAFCFLSHDHGRTWARGHFVAQDTLECQVAEVETGEQRVVTLNARSHLRARVQAQS
TNDGLDFQESQLVKKLVEPPPQGCQGSVISFPSPRSGPGSPAQWLLYTHPTHSWQRADLGAY
LNPRPPAPEAWSEPVLLAKGSAAYSDLQSMGTGPDGSPLFGCLYEANDYEEIVFLMFTLKQA
FPAEYLPQEPKSSDKTHTCPPCPAPELLGGPSVFLFPPKPKDTLMISRTPEVTCVVVDVSHE
DPEVKFNWYVDGVEVHNAKTKPREEQYNSTYRVVSVLTVLHQDWLNGKEYKCKVSNKALPAP
IEKTISKAKGQPREPQVYTLPPSREEMTKNQVSLTCLVKGFYPSDIAVEWESNGQPENNYKT
TPPVLDSDGSFFLTSKLTVDKSRWQQGNVFSCSVMHEALHNHYTOKSLSLSPGK
SEQ ID NO: 198:
DASLPYLQKESVFQSGAHAYRIPALLYLPGQQSLLAFAEQRASKKDEHAELIVLRRGDYDAG
THQVQWQAQEVVAQARLDGHRSMNPCPLYDEQTGTLFLFFIAIPGQVTEQQQLQTRANVTRL
CYVTSTDHGRTWSSPRDLTDAAIGPAYREWSTFAVGPGHCLQLHDRARSLVVPAYAYRKLHP
KQRPIPSAFCFLSHDHGRTWARGHFVAQDTLECQVAEVETGEQRVVTLNARSHLRARVQAQS
TNDGLDFQESQLVKKLVEPPPQGCQGSVISFPSPRSGPGSPAQWLLYTHPTHSWQRADLGAY
LNPRPPAPEAWSEPVLLAKGSAAYSDLQSMGTGPDGSPLFGCLYEANDYEEIVFLMFTLKQA
FPAEYLPQEPKSSDKTHTCPPCPAPELLGGPSVFLFPPKPKDTLMISRTPEVTCVVVDVSHE
DPEVKFNWYVDGVEVHNAKTKPREEQYNSTYRVVSVLTVLHQDWLNGKEYKCKVSNKALPAP
IEKTISKAKGQPREPQVYTLPPSREEMTKNQVSLTCLVKGFYPSDIAVEWESNGQPENNYKT
TPPVLDSDGSFFLYSKLTVDKSRWQQGNVFSCSVMHEALHNHYTQKSLSLSPGK
SEQ ID NO: 199:
DASLPYLQKESVFQSGAHAYRIPALLYLPGQQSLLAFAEQRASKKDEHAELIVLRRGDYDAG
THQVQWQAQEVVAQARLDGHRSMNPCPLYDEQTGTLFLFFIAIPGQVTEQQQLQTRANVTRL
CYVTSTDHGRTWSSPRDLTDAAIGPAYREWSTFAVGPGHCLQLHDRARSLVVPAYAYRKLHP
KQRPIPSAFCFLSHDHGRTWARGHFVAQDTLECQVAEVETGEQRVVTLNARSHLRARVQAQS
TNDGLDFQESQLVKKLVEPPPQGCQGSVISFPSPRSGPGSPAQWLLYTHPTHSWQRADLGAY
LNPRPPAPEAWSEPVLLAKGSAAYSDLQSMGTGPDGSPLFGCLYEANDYEEIVFLMFTLKQA
FPAEYLPQEPKSSDKTHTCPPCPAPELLGGPSVFLFPPKPKDTLMISRTPEVTCVVVDVSHE
DPEVKFNWYVDGVEVHNAKTKPREEQYNSTYRVVSVLTVLHQDWLNGKEYKCKVSNKALPAP
IEKTISKAKGQPREPQVYTLPPSREEMTKNQVSLTCLVKGFYPSDIAVEWESNGQPENNYKT
TPPVLDSDGSFFLYSKLTVDKSRWQQGNVFSCSVMHEALHNHYTQKSLSLSPGKGGGGSGGG
GSGGGGSEVQLVESGGGLVQPGGSLRLSCAASGFNIKDTYIHWVRQAPGKGLEWVARIYPTN
GYTRYADSVKGRFTISADTSKNTAYLQMNSLRAEDTAVYYCSRWGGDGFYAMDYWGQGTLVT
VSSGGGGSGGGGSGGGGSDIQMTQSPSSLSASVGDRVTITCRASQDVNTAVAWYQQKPGKAP
KLLIYSASFLYSGVPSRFSGSRSGTDFTLTISSLQPEDFATYYCQQHYTTPPTFGQGTKVEI
K
SEQ ID NO: 200:
DASLPYLQKESVFQSGAHAYRIPALLYLPGQQSLLAFAEQRASKKDEHAELIVLRRGDYDAG
THQVQWQAQEVVAQARLDGHRSMNPCPLYDEQTGTLFLFFIAIPGQVTEQQQLQTRANVTRL
CYVTSTDHGRTWSSPRDLTDAAIGPAYREWSTFAVGPGHCLQLHDRARSLVVPAYAYRKLHP
KQRPIPSAFCFLSHDHGRTWARGHFVAQDTLECQVAEVETGEQRVVTLNARSHLRARVQAQS
TNDGLDFQESQLVKKLVEPPPQGCQGSVISFPSPRSGPGSPAQWLLYTHPTHSWQRADLGAY
LNPRPPAPEAWSEPVLLAKGSAAYSDLQSMGTGPDGSPLFGCLYEANDYEEIVFLMFTLKQA
FPAEYLPQGGGGSGGGGSDKTHTCPPCPAPELLGGPSVFLFPPKPKDTLMISRTPEVTCVVV
DVSHEDPEVKFNWYVDGVEVHNAKTKPREEQYNSTYRVVSVLTVLHQDWLNGKEYKCKVSNK
ALPAPIEKTISKAKGQPREPQVYTLPPSREEMTKNQVSLTCLVKGFYPSDIAVEWESNGQPE
NNYKTTPPVLDSDGSFFLTSKLTVDKSRWQQGNVFSCSVMHEALHNHYTQKSLSLSPGK
SEQ ID NO: 201:
GATGCATCTCTGCCTTACCTGCAGAAAGAAAGCGTGTTCCAGTCTGGCGCCCACGCCTACAG
AATTCCCGCTCTGCTGTATCTGCCAGGCCAGCAGTCTCTGCTGGCTTTCGCTGAACAGCGGG
CCAGCAAGAAGGATGAGCACGCCGAACTGATCGTGCTGCGGAGAGGCGATTACGACGCCGGC
ACACATCAGGTGCAGTGGCAGGCTCAAGAGGTGGTGGCTCAGGCTAGACTGGACGGCCACAG
ATCTATGAACCCCTGTCCTCTGTACGATGAACAGACCGGCACACTGTTTCTGTTCTTTATCG
CTATCCCCGGCCAAGTGACCGAGCAGCAGCAGCTGCAGACAAGAGCCAACGTGACCAGACTG
TGTTACGTGACCTCCACCGACCACGGCAGAACCTGGTCTAGCCCTAGAGATCTGACCGACGC
CGCCATCGGACCTGCCTATAGAGAGTGGTCCACCTTCGCCGTTGGACCTGGACACTGTCTCC
AGCTGCACGACAGGGCTAGATCTCTGGTGGTGCCTGCCTACGCCTATAGAAAGCTGCACCCC
AAACAGCGGCCTATTCCTAGCGCCTTCTGCTTTCTGAGCCACGATCACGGCAGGACATGGGC
CAGAGGACATTTCGTGGCCCAGGACACACTGGAATGCCAGGTGGCCGAAGTGGAAACCGGCG
AGCAGAGAGTCGTGACCCTGAACGCCAGATCTCACCTGAGAGCCAGAGTGCAGGCCCAGAGC
ACAAACGACGGCCTGGATTTCCAAGAGAGCCAGCTGGTCAAGAAACTGGTGGAACCTCCTCC
ACAGGGCTGTCAGGGAAGCGTGATCAGCTTTCCATCTCCTAGAAGCGGCCCTGGCTCTCCTG
CTCAGTGGCTGCTGTATACACACCCCACACACAGCTGGCAGAGAGCCGATCTGGGCGCCTAC
CTGAATCCTAGACCTCCTGCTCCTGAGGCTTGGAGCGAACCTGTTCTGCTGGCCAAGGGCAG
CGCTGCCTACAGCGATCTGCAGTCTATGGGCACAGGCCCTGATGGCAGCCCTCTGTTTGGCT
GTCTGTACGAGGCCAACGACTACGAAGAGATCGTGTTCCTGATGTTCACCCTGAAGCAGGCC
TTTCCAGCCGAGTACCTGCCTCAAGAGCCCAAATCTTCTGACAAAACTCACACATGCCCACC
GTGCCCAGCACCTGAACTCCTGGGGGGACCGTCAGTCTTCCTCTTCCCCCCAAAACCCAAGG
ACACCCTCATGATCTCCCGGACCCCTGAGGTCACATGCGTGGTGGTGGACGTGAGCCACGAA
GACCCTGAGGTCAAGTTCAACTGGTACGTGGACGGCGTGGAGGTGCATAATGCCAAGACAAA
GCCGCGGGAGGAGCAGTACAACAGCACGTACCGTGTGGTCAGCGTCCTCACCGTCCTGCACC
AGGACTGGCTGAATGGCAAGGAGTACAAGTGCAAGGTCTCCAACAAAGCCCTCCCAGCCCCC
ATCGAGAAAACCATCTCCAAAGCCAAAGGGCAGCCCCGAGAACCACAGGTCTACACCCTGCC
CCCATCCCGGGAGGAGATGACCAAGAACCAGGTCAGCCTGACCTGCCTGGTCAAAGGCTTCT
ATCCCAGCGACATCGCCGTGGAGTGGGAGAGCAATGGGCAGCCGGAGAACAACTACAAGACC
ACGCCTCCCGTGCTGGACTCCGACGGCTCCTTCTTCCTCTATAGCAAGCTCACCGTGGACAA
GAGCAGGTGGCAGCAGGGGAACGTCTTCTCATGCTCCGTGATGCATGAGGCTCTGCACAACC
ACTACACGCAGAAGAGCCTCTCCCTGTCTCCGGGTAAA

What is claimed is:

1. A pharmaceutical composition comprising a sialidase conjugated to a serum half-life enhancer that increases the serum half-life of the sialidase when administered to a subject.

2. The pharmaceutical composition of claim 1, wherein the sialidase is not conjugated to a cancer antigen targeting agent that binds a cancer antigen associated with a cancerous cell.

3. The pharmaceutical composition of claims 1-2, wherein the sialidase is a functional fragment of a full-length sialidase that exhibits at least 50% of the activity of the full-length sialidase.

4. The pharmaceutical composition of any one of claims 1-3, wherein the sialidase is a variant that exhibits at least 50% of the activity of the wild-type sialidase.

5. The pharmaceutical composition of any one of claims 1-4, wherein the sialidase and the serum half-life enhancer are covalently linked together in a fusion protein.

6. The pharmaceutical composition of any one of claims 1-4, wherein the sialidase and serum half-life enhancer are chemically conjugated together.

7. The pharmaceutical composition of claims 1-6, wherein the serum half-life enhancer is selected from the group consisting of an Fc domain, transferrin, albumin, XTEN, a homo-amino acid polymer (HAP), a proline-alanine-serine polymer (PAS), an elastin-like peptide (ELP), albumin binding domain, CTP fusion, GLK fusion, and a polyethylene glycol.

8. The pharmaceutical composition of claims 1-7, wherein the serum half-life enhancer is an Fc domain.

9. The pharmaceutical composition of claims 1-7, wherein the serum half-life enhancer is not an Fc domain or polyethylene glycol.

10. The pharmaceutical composition of claims 1-9, wherein the sialidase comprises one or more mutations relative to a template, wild-type sialidase.

11. The pharmaceutical composition of claims 1-10, wherein the sialidase comprises:
(a) a substitution or deletion of a methionine residue at a position corresponding to position 1 of wild-type human Neu2 (M1);
(b) a substitution of a valine residue at a position corresponding to position 6 of wild-type human Neu2 (V6);
(c) a substitution of an isoleucine residue at a position corresponding to position 187 of wild-type human Neu2 (I187); or
(d) a substitution of a cysteine residue at a position corresponding to position 332 of wild-type human Neu2 (C332);
or a combination of any of the foregoing substitutions.

12. The pharmaceutical compositions of claim 11, wherein, in the sialidase:
(a) the methionine residue at a position corresponding to position 1 of wild-type human Neu2 is deleted (ΔM1), is substituted by alanine (M1A), or is substituted by aspartic acid (M1D);
(b) the valine residue at a position corresponding to position 6 of wild-type human Neu2 is substituted by tyrosine (V6Y);
(c) the isoleucine residue at a position corresponding to position 187 of wild-type human Neu2 is substituted by lysine (I187K); or
(d) the cysteine residue at a position corresponding to position 332 of wild-type human Neu2 is substituted by alanine (C332A);
or the sialidase comprises a combination of any of the foregoing substitutions.

13. The pharmaceutical composition of claims 1-11, wherein the sialidase comprises:
(a) a substitution or deletion of a methionine residue at a position corresponding to position 1 of wild-type human Neu2 (M1);
(b) a substitution of a valine residue at a position corresponding to position 6 of wild-type human Neu2 (V6);
(c) a substitution of an proline residue at a position corresponding to position 62 of wild-type human Neu2 (P62);
(d) a substitution of an alanine residue at a position corresponding to position 93 of wild-type human Neu2 (A93);
(e) a substitution of an isoleucine residue at a position corresponding to position 187 of wild-type human Neu2 (I187);
(f) a substitution of a glutamine residue at a position corresponding to position 126 of wild-type human Neu2 (Q126);
(g) a substitution of an alanine residue at a position corresponding to position 242 of wild-type human Neu2 (A242);
(h) a substitution of a glutamine residue at a position corresponding to position 270 of wild-type human Neu2 (Q270);
(i) a substitution of a serine residue at a position corresponding to position 301 of wild-type human Neu2 (S301);
(j) a substitution of a tryptophan residue at a position corresponding to position 302 of wild-type human Neu2 (W302);
(k) a substitution of a cysteine residue at a position corresponding to position 332 of wild-type human Neu2 (C332);
(l) or a combination of any of the foregoing substitutions.

14. The pharmaceutical composition of any preceding claim, wherein the sialidase comprises a combination of substitutions selected from the group consisting of:
(a) M1D, V6Y, P62G, A93E, I187K, C332A;
(b) M1D, V6Y, P62G, A93E, I187K, S301A, W302R, C332A;
(c) M1D, V6Y, P62G, A93E, Q126Y, I187K, A242F, Q270T, C332A;
(d) M1D, V6Y, P62G, A93E, Q126Y, I187K, C332A; and
(e) A93E, Q126Y, I187K, A242F, Q270T, C332A.

15. The pharmaceutical composition of claim 14, wherein the sialidase conjugated to a serum half-life enhancer comprises an amino acid sequence selected from the group consisting of SEQ ID NOs: 115, 152, 180, 184, and 188, or an amino acid sequence that has at least 85%, 90%, 95%, 96%, 97%, 98%, or 99% to an amino acid sequence selected from the group consisting of SEQ ID NOs: 115, 152, 180, 184, and 188.

16. The pharmaceutical composition of any preceding claim, wherein the sialidase comprises:
(a) a substitution of a proline residue at a position corresponding to position 5 of wild-type human Neu2 (PS);
(b) a substitution of a lysine residue at a position corresponding to position 9 of wild-type human Neu2 (K9);
(c) a substitution of a lysine residue at a position corresponding to position 44 of wild-type human Neu2 (K44);
(d) a substitution of a lysine residue at a position corresponding to position 45 of wild-type human Neu2 (K45);
(e) a substitution of a leucine residue at a position corresponding to position 54 of wild-type human Neu2 (L54);
(f) a substitution of a proline residue at a position corresponding to position 62 of wild-type human Neu2 (P62);
(g) a substitution of a glutamine residue at a position corresponding to position 69 of wild-type human Neu2 (Q69);
(h) a substitution of an arginine residue at a position corresponding to position 78 of wild-type human Neu2 (R78);
(i) a substitution of an aspartic acid residue at a position corresponding to position 80 of wild-type human Neu2 (D80);
(j) a substitution of an alanine residue at a position corresponding to position 93 of wild-type human Neu2 (A93);
(k) a substitution of a glycine residue at a position corresponding to position 107 of wild-type human Neu2 (G107);
(l) a substitution of a glutamine residue at a position corresponding to position 108 of wild-type human Neu2 (Q108);
(m) a substitution of a glutamine residue at a position corresponding to position 112 of wild-type human Neu2 (Q112);
(n) a substitution of a cysteine residue at a position corresponding to position 125 of wild-type human Neu2 (C125);
(o) a substitution of a glutamine residue at a position corresponding to position 126 of wild-type human Neu2 (Q126);
(p) a substitution of an alanine residue at a position corresponding to position 150 of wild-type human Neu2 (A150);
(q) a substitution of a cysteine residue at a position corresponding to position 164 of wild-type human Neu2 (C164);
(r) a substitution of an arginine residue at a position corresponding to position 170 of wild-type human Neu2 (R170);
(s) a substitution of an alanine residue at a position corresponding to position 171 of wild-type human Neu2 (A171);
(t) a substitution of a glutamine residue at a position corresponding to position 188 of wild-type human Neu2 (Q188);
(u) a substitution of an arginine residue at a position corresponding to position 189 of wild-type human Neu2 (R189);
(v) a substitution of an alanine residue at a position corresponding to position 213 of wild-type human Neu2 (A213);
(w) a substitution of a leucine residue at a position corresponding to position 217 of wild-type human Neu2 (L217);
(x) a substitution of a glutamic acid residue at a position corresponding to position 225 of wild-type human Neu2 (E225);
(y) a substitution of a histidine residue at a position corresponding to position 239 of wild-type human Neu2 (H239);
(z) a substitution of a leucine residue at a position corresponding to position 240 of wild-type human Neu2 (L240);
(aa) a substitution of an arginine residue at a position corresponding to position 241 of wild-type human Neu2 (R241);
(bb) a substitution of an alanine residue at a position corresponding to position 242 of wild-type human Neu2 (A242);
(cc) a substitution of a valine residue at a position corresponding to position 244 of wild-type human Neu2 (V244);
(dd) a substitution of a threonine residue at a position corresponding to position 249 of wild-type human Neu2 (T249);
(ee) a substitution of an aspartic acid residue at a position corresponding to position 251 of wild-type human Neu2 (D251);
(ff) a substitution of a glutamic acid residue at a position corresponding to position 257 of wild-type human Neu2 (E257);
(gg) a substitution of a serine residue at a position corresponding to position 258 of wild-type human Neu2 (S258);
(hh) a substitution of a leucine residue at a position corresponding to position 260 of wild-type human Neu2 (L260);
(ii) a substitution of a valine residue at a position corresponding to position 265 of wild-type human Neu2 (V265);
(jj) a substitution of a glutamine residue at a position corresponding to position 270 of wild-type human Neu2 (Q270);
(kk) a substitution of a tryptophan residue at a position corresponding to position 292 of wild-type human Neu2 (W292);
(ll) a substitution of a serine residue at a position corresponding to position 301 of wild-type human Neu2 (S301);
(mm) a substitution of a tryptophan residue at a position corresponding to position 302 of wild-type human Neu2 (W302);
(nn) a substitution of a cysteine residue at a position corresponding to position 332 of wild-type human Neu2 (C332);
(oo) a substitution of a valine residue at a position corresponding to position 363 of wild-type human Neu2 (V363); or
(pp) a substitution of a leucine residue at a position corresponding to position 365 of wild-type human Neu2 (L365);
or a combination of any of the foregoing substitutions.

17. The pharmaceutical composition of claims 1-16, wherein the sialidase is selected from the group consisting of a bacterial sialidase, a viral sialidase, and a mammalian sialidase.

18. The pharmaceutical composition of claim 17, wherein the mammalian sialidase is a human sialidase.

19. The pharmaceutical composition of claim 18, wherein the human sialidase is selected from the group consisting of neu1, neu2, neu3, and neu4.

20. The pharmaceutical composition of claim 19, wherein the human sialidase is neu2.

21. The pharmaceutical composition of any one of claims 1-20, comprising from about 0.01 mg/kg to about 100 mg/kg of the sialidase.

22. The pharmaceutical composition of any one of claims 1-21 wherein the pharmaceutical composition comprises a second therapeutic agent.

23. The pharmaceutical composition of claim 22, wherein the second therapeutic agent is selected from the group consisting of an anti-inflammatory agent, anti-angiogenic agent, anti-fibrotic agent, or an anti-proliferative compound (e.g., a cytotoxic agent or a checkpoint inhibitor).

24. The pharmaceutical composition of any one of claims 1-23, wherein the pharmaceutical composition further comprises a stabilizing amount of a sialidase stabilizing agent.

25. The pharmaceutical composition of claim 24, wherein the sialidase stabilizing agent is a cation.

26. The pharmaceutical composition of claim 25, wherein the cation is selected from the group consisting of calcium and magnesium.

27. The pharmaceutical composition of any one of claims 1-26, wherein the pharmaceutical composition is disposed in a sterile container (e.g., bottle or vial).

28. The pharmaceutical composition of claim 27, wherein the pharmaceutical composition is lyophilized in the sterile container.

29. The pharmaceutical composition of claim 28, wherein the pharmaceutical composition is present as a solution in the sterile container.

30. The pharmaceutical composition of any one of claims 27-29, wherein the sterile container is sealed with a septum.

31. The pharmaceutical composition of any one of claims 27-30, wherein the sterile container has a label disposed thereon identifying the pharmaceutical composition contained in the container.

32. A method of treating a sialic acid-related disorder in a subject in need thereof, the method comprising administering to the subject a pharmaceutical composition comprising an effective amount of a sialidase and a serum half-life enhancer that increases the serum half-life of the sialidase when administered to a subject, thereby to treat the disorder.

33. The method of claim 32, wherein the sialic acid-related disorder is cancer.

34. The method of claim 33, wherein the sialidase is not conjugated to a cancer antigen targeting agent that binds a cancer antigen associated with a cancerous cell.

35. The method of any one of claims 32-34, wherein the sialidase is a functional fragment of a full-length sialidase that exhibits at least 50% of the activity of the full-length sialidase.

36. The method of any one of claims 32-35, wherein the sialidase is a variant that exhibits at least 50% of the activity of the wild-type sialidase.

37. The method of any one of claims 32-36, wherein the sialidase and the serum half-life enhancer are covalently linked together in a fusion protein.

38. The method of any one of claims 32-36, wherein the sialidase and serum half-life enhancer are chemically conjugated together.

39. The method of any one of claims 32-37, wherein the serum half-life enhancer is selected from the group consisting of an Fc domain, transferrin, albumin, XTEN, a homo-amino acid polymer (HAP), a proline-alanine-serine polymer (PAS), an elastin-like peptide (ELP), and a polyethylene glycol.

40. The method of any one of claims 32-39, wherein the serum half-life enhancer is an Fc domain.

41. The method of any one of claims 32-39, wherein the serum half-life enhancer is not an Fc domain or polyethylene glycol.

42. The method of any one of claims 32-41, wherein the sialidase comprises one or more mutations relative to a template, wild-type sialidase.

43. The method of any one of claims 32-42, wherein the sialidase comprises:
(a) a substitution or deletion of a methionine residue at a position corresponding to position 1 of wild-type human Neu2 (M1);
(b) a substitution of a valine residue at a position corresponding to position 6 of wild-type human Neu2 (V6);
(c) a substitution of an isoleucine residue at a position corresponding to position 187 of wild-type human Neu2 (I187); or
(d) a substitution of a cysteine residue at a position corresponding to position 332 of wild-type human Neu2 (C332);
or a combination of any of the foregoing substitutions.

44. The method of claim 43, wherein, in the sialidase:
(a) the methionine residue at a position corresponding to position 1 of wild-type human Neu2 is deleted (ΔM1), is substituted by alanine (M1A), or is substituted by aspartic acid (M1D);
(b) the valine residue at a position corresponding to position 6 of wild-type human Neu2 is substituted by tyrosine (V6Y);
(c) the isoleucine residue at a position corresponding to position 187 of wild-type human Neu2 is substituted by lysine (I187K); or
(d) the cysteine residue at a position corresponding to position 332 of wild-type human Neu2 is substituted by alanine (C332A);
or the sialidase comprises a combination of any of the foregoing substitutions.

45. The method of any one of claims 32-44, wherein the sialidase comprises:
(a) a substitution or deletion of a methionine residue at a position corresponding to position 1 of wild-type human Neu2 (M1);
(b) a substitution of a valine residue at a position corresponding to position 6 of wild-type human Neu2 (V6);
(c) a substitution of an proline residue at a position corresponding to position 62 of wild-type human Neu2 (P62);
(d) a substitution of an alanine residue at a position corresponding to position 93 of wild-type human Neu2 (A93);
(e) a substitution of an isoleucine residue at a position corresponding to position 187 of wild-type human Neu2 (I187);
(f) a substitution of a glutamine residue at a position corresponding to position 126 of wild-type human Neu2 (Q126);
(g) a substitution of an alanine residue at a position corresponding to position 242 of wild-type human Neu2 (A242);
(h) a substitution of a glutamine residue at a position corresponding to position 270 of wild-type human Neu2 (Q270);
(i) a substitution of a serine residue at a position corresponding to position 301 of wild-type human Neu2 (S301);
(j) a substitution of a tryptophan residue at a position corresponding to position 302 of wild-type human Neu2 (W302);
(k) a substitution of a cysteine residue at a position corresponding to position 332 of wild-type human Neu2 (C332);
(l) or a combination of any of the foregoing substitutions.

46. The method of any one of claims 32-45, wherein the sialidase comprises a combination of substitutions selected from the group consisting of:
(a) M1D, V6Y, P62G, A93E, I187K, C332A;
(b) M1D, V6Y, P62G, A93E, I187K, S301A, W302R, C332A;
(c) M1D, V6Y, P62G, A93E, Q126Y, I187K, A242F, Q270T, C332A;
(d) M1D, V6Y, P62G, A93E, Q126Y, I187K, C332A; and
(e) A93E, Q126Y, I187K, A242F, Q270T, C332A.

47. The method of claim 46, wherein the sialidase conjugated to a serum half-life enhancer comprises an amino acid sequence selected from the group consisting of SEQ ID NOs: 115, 152, 180, 184, and 188, or an amino acid sequence that has at least 85%, 90%, 95%, 96%, 97%, 98%, or 99% to an amino acid sequence selected from the group consisting of SEQ ID NOs: 115, 152, 180, 184, and 188.

48. The method of any one of claims 32-47, wherein the sialidase comprises:
(a) a substitution of a proline residue at a position corresponding to position 5 of wild-type human Neu2 (P5);
(b) a substitution of a lysine residue at a position corresponding to position 9 of wild-type human Neu2 (K9);
(c) a substitution of a lysine residue at a position corresponding to position 44 of wild-type human Neu2 (K44);
(d) a substitution of a lysine residue at a position corresponding to position 45 of wild-type human Neu2 (K45);
(e) a substitution of a leucine residue at a position corresponding to position 54 of wild-type human Neu2 (L54);
(f) a substitution of a proline residue at a position corresponding to position 62 of wild-type human Neu2 (P62);
(g) a substitution of a glutamine residue at a position corresponding to position 69 of wild-type human Neu2 (Q69);
(h) a substitution of an arginine residue at a position corresponding to position 78 of wild-type human Neu2 (R78);
(i) a substitution of an aspartic acid residue at a position corresponding to position 80 of wild-type human Neu2 (D80);
(j) a substitution of an alanine residue at a position corresponding to position 93 of wild-type human Neu2 (A93);
(k) a substitution of a glycine residue at a position corresponding to position 107 of wild-type human Neu2 (G107);
(l) a substitution of a glutamine residue at a position corresponding to position 108 of wild-type human Neu2 (Q108);
(m) a substitution of a glutamine residue at a position corresponding to position 112 of wild-type human Neu2 (Q112);
(n) a substitution of a cysteine residue at a position corresponding to position 125 of wild-type human Neu2 (C125);
(o) a substitution of a glutamine residue at a position corresponding to position 126 of wild-type human Neu2 (Q126);
(p) a substitution of an alanine residue at a position corresponding to position 150 of wild-type human Neu2 (A150);
(q) a substitution of a cysteine residue at a position corresponding to position 164 of wild-type human Neu2 (C164);
(r) a substitution of an arginine residue at a position corresponding to position 170 of wild-type human Neu2 (R170);
(s) a substitution of an alanine residue at a position corresponding to position 171 of wild-type human Neu2 (A171);
(t) a substitution of a glutamine residue at a position corresponding to position 188 of wild-type human Neu2 (Q188);
(u) a substitution of an arginine residue at a position corresponding to position 189 of wild-type human Neu2 (R189);
(v) a substitution of an alanine residue at a position corresponding to position 213 of wild-type human Neu2 (A213);
(w) a substitution of a leucine residue at a position corresponding to position 217 of wild-type human Neu2 (L217);
(x) a substitution of a glutamic acid residue at a position corresponding to position 225 of wild-type human Neu2 (E225);
(y) a substitution of a histidine residue at a position corresponding to position 239 of wild-type human Neu2 (H239);
(z) a substitution of a leucine residue at a position corresponding to position 240 of wild-type human Neu2 (L240);
(aa) a substitution of an arginine residue at a position corresponding to position 241 of wild-type human Neu2 (R241);
(bb) a substitution of an alanine residue at a position corresponding to position 242 of wild-type human Neu2 (A242);
(cc) a substitution of a valine residue at a position corresponding to position 244 of wild-type human Neu2 (V244);
(dd) a substitution of a threonine residue at a position corresponding to position 249 of wild-type human Neu2 (T249);
(ee) a substitution of an aspartic acid residue at a position corresponding to position 251 of wild-type human Neu2 (D251);
(ff) a substitution of a glutamic acid residue at a position corresponding to position 257 of wild-type human Neu2 (E257);
(gg) a substitution of a serine residue at a position corresponding to position 258 of wild-type human Neu2 (S258);
(hh) a substitution of a leucine residue at a position corresponding to position 260 of wild-type human Neu2 (L260);
(ii) a substitution of a valine residue at a position corresponding to position 265 of wild-type human Neu2 (V265);
(jj) a substitution of a glutamine residue at a position corresponding to position 270 of wild-type human Neu2 (Q270);
(kk) a substitution of a tryptophan residue at a position corresponding to position 292 of wild-type human Neu2 (W292);
(ll) a substitution of a serine residue at a position corresponding to position 301 of wild-type human Neu2 (S301);
(mm) a substitution of a tryptophan residue at a position corresponding to position 302 of wild-type human Neu2 (W302);
(nn) a substitution of a cysteine residue at a position corresponding to position 332 of wild-type human Neu2 (C332);
(oo) a substitution of a valine residue at a position corresponding to position 363 of wild-type human Neu2 (V363); or
(pp) a substitution of a leucine residue at a position corresponding to position 365 of wild-type human Neu2 (L365);
or a combination of any of the foregoing substitutions.

49. The method of any one of claims 32-48, wherein the sialidase is selected from the group consisting of a bacterial sialidase, a viral sialidase, and a mammalian sialidase.

50. The method of claim 49, wherein the mammalian sialidase is a human sialidase.

51. The method of claim 50, wherein the human sialidase is selected from the group consisting of neu1, neu2, neu3, and neu4.

52. The method of claim 51, wherein the human sialidase is neu2.

53. The method of any one of claims 32-52, wherein from about 0.01 mg/kg to about 100 mg/kg of the sialidase is administered to the subject.

54. The method of any one of claims 32-53, wherein the cancer is a solid tumor, soft tissue tumor, hematopoietic tumor or metastatic lesion.

55. The method of claim 54, wherein the solid tumor is a sarcoma, adenocarcinoma, or carcinoma.

56. The method of claim 54 or 55, wherein the solid tumor is a head and neck (e.g., pharynx), thyroid, lung (e.g., small cell or non-small cell lung carcinoma (NSCLC)), breast, lymphoid, gastrointestinal (e.g., oral, esophageal, stomach, liver, pancreas, small intestine, colon and rectum, anal canal), genital or genitourinary tract (e.g., renal, urothelial, bladder, ovarian, uterine, cervical, endometrial, prostate, testicular), CNS (e.g., neural or glial cell, e.g., neuroblastoma or glioma), or skin (e.g., melanoma) tumor.

57. The method of claim 56, wherein the hematopoietic tumor is a leukemia, acute leukemia, acute lymphoblastic leukemia (ALL), B-cell, T-cell or FAB ALL, acute myeloid leukemia (AML), chronic myelocytic leukemia (CML), chronic lymphocytic leukemia (CLL), e.g., transformed CLL, diffuse large B-cell lymphoma (DLBCL), follicular lymphoma, hairy cell leukemia, myelodyplastic syndrome (MDS), lymphoma, Hodgkin's disease, malignant lymphoma, non-Hodgkin's lymphoma, Burkitt's lymphoma, multiple myeloma, or Richter's Syndrome (Richter's Transformation).

58. The method of claim 56, wherein the cancer is breast cancer.

59. The method of any one of claim 56, wherein the cancer is lymphoma.

60. The method of any one of claims 32-59, wherein administration of the pharmaceutical composition increases expression of granzyme B, IFNγ, IL-10, IL-6, or IL-17A in the subject.

61. The method of any one of claims 32-60, wherein the pharmaceutical composition is administered to the subject in combination with another therapeutic agent.

62. The method of claim 61, wherein the therapeutic agent is selected from the group consisting of an anti-inflammatory agent, anti-angiogenic agent, anti-fibrotic agent, or an anti-proliferative compound (e.g., a cytotoxic agent or a checkpoint inhibitor).

63. The method of any one of claims 32-62, wherein the pharmaceutical composition further comprises a stabilizing amount of a sialidase stabilizing agent.

64. The method of claim 63, wherein the sialidase stabilizing agent is a cation.

65. The method of claim 64, wherein the cation is selected from the group consisting of calcium and magnesium.

66. The method of any one of claim 65, wherein the pharmaceutical composition, prior to administration, is disposed in a sterile container (e.g., bottle or vial).

67. A method of treating cancer in a subject in need thereof, the method comprising administering an effective amount of the pharmaceutical composition of any one of claims 1-31 to the subject.

68. A method of removing sialic acid from a cell in a subject, the method comprising administering to the subject an effective amount of the pharmaceutical composition of any one of claims 1-31 thereby to remove sialic acid from the cell.

69. The method of claim 68, wherein the cell is a tumor cell, dendritic cell (DC) or monocyte.

70. The method of claim 69, wherein the cell is a monocyte, and the method results in increased expression of an MHC-11 molecule on the monocyte.

71. A method of increasing phagocytosis of a tumor cell in a subject, the method comprising administering to the subject an effective amount of the pharmaceutical composition of any one of claims 1-31 in an amount effective to remove sialic acid from the tumor cell, thereby increasing phagocytosis of the tumor cell.

72. A method of activating a dendritic cell (DC) in a subject, the method comprising administering to the subject an amount of the pharmaceutical composition of any one of claims 1-31 effective to remove sialic acid from a tumor cell in the subject, thereby to activate the DC in the subject.

73. A method of reducing Siglec-15 binding activity, thereby increasing anti-tumor activity in a tumor microenvironment of a patient, the method comprising administering to the subject an effective amount of the pharmaceutical composition of any one of claims 1-31, thereby increasing anti-tumor activity (e.g., T cell activity) in the subject.

74. A method of expressing a recombinant sialidase, the method comprising:
(a) providing a cell comprising a nucleic acid encoding the recombinant sialidase; and
(b) expressing the recombinant sialidase in the presence of a stabilizing agent.

75. The method of claim 74, wherein the method further comprises purifying the recombinant sialidase produced in step (b).

76. The method of claim 75, wherein the purification is performed in the presence of a stabilizing agent.

77. The method of any one of claims 74-76, wherein the stabilizing agent is a cation.

78. The method of claim 77, wherein the cation is selected from the group consisting of calcium and magnesium.

The application's sequence listing, which the Patent Office published only in electronic form, follows.

SEQUENCE LISTING (202 sequences)

SEQ ID NO: 1 - protein, 380 aa, Homo sapiens
MASLPVLQKESVFQSGAHAYRIPALLYLPGQQSLLAFAEQRASKKDEHAELIVLRRGDYDAPTHQVQWQAQEVVAQARLDGHRSMNPCPLYDAQTGTLFLFFIAIPGQVTEQQQLQTRANVTRLCQVTSTDHGRTWSSPRDLTDAAIGPAYREWSTFAVGPGHCLQLHDRARSLVVPAYAYRKLHPIQRPIPSAFCFLSHDHGRTWARGHFVAQDTLECQVAEVETGEQRVVTLNARSHLRARVQAQSTNDGLDFQESQLVKKLVEPPPQGCQGSVISFPSPRSGPGSPAQWLLYTHPTHSWQRADLGAYLNPRPPAPEAWSEPVLLAKGSCAYSDLQSMGTGPDGSPLFGCLYEANDYEEIVFLMFTLKQAFPAEYLPQ

SEQ ID NO: 2 - protein, 385 aa, Mus musculus
MEDLRPMATCPVLQKETLFRTGVHAYRIPALLYLKKQKTLLAFAEKRASKTDEHAELIVLRRGSYNEATNRVKWQPEEVVTQAQLEGHRSMNPCPLYDKQTKTLFLFFIAVPGRVSEHHQLHTKVNVTRLCCVSSTDHGRTWSPIQDLTETTIGSTHQEWATFAVGPGHCLQLRNPAGSLLVPAYAYRKLHPAQKPTPFAFCFISLDHGHTWKLGNFVAENSLECQVAEVGTGAQRMVYLNARSFLGARVQAQSPNDGLDFQDNRVVSKLVEPPHGCHGSVVAFHNPISKPHALDTWLLYTHPTDSRNRTNLGVYLNQMPLDPTAWSEPTLLAMGICAYSDLQNMGQGPDGSPQFGCLYESGNYEEIIFLIFTLKQAFPTVFDAQ

SEQ ID NO: 3 - protein, 5 aa, Mus musculus
EDLRP

SEQ ID NO: 4 - protein, 6 aa, Mus musculus
MEDLRP

SEQ ID NO: 5 - protein, 227 aa, Artificial Sequence
  Description of Artificial Sequence: Synthetic polypeptide
DKTHTCPPCPAPELLGGPSVFLFPPKPKDTLMISRTPEVTCVVVDVSHEDPEVKFNWYVDGVEVHNAKTKPREEQYNSTYRVVSVLTVLHQDWLNGKEYKCKVSNKALPAPIEKTISKAKGQPREPQVYTLPPSREEMTKNQVSLTCLVKGFYPSDIAVEWESNGQPENNYKTTPPVLDSDGSFFLYSKLTVDKSRWQQGNVFSCSVMHEALHNHYTQKSLSLSPGK

SEQ ID NO: 6 - DNA, 1143 bp, Salmonella typhimurium
acagtggaaaagtccgtggtgttcaaggccgagggcgagcacttcaccgaccagaaaggcaataccatcgtcggctctggcagcggcggcaccaccaagtactttagaatccccgccatgtgcaccaccagcaagggcaccattgtggtgttcgccgacgccagacacaacaccgccagcgatcagagcttcatcgataccgctgccgccagatctaccgatggcggcaagacctggaacaagaagatcgccatctacaacgaccgcgtgaacagcaagctgagcagagtgatggaccctacctgcatcgtggccaacatccagggcagagaaaccatcctggtcatggtcggaaagtggaacaacaacgataagacctggggcgcctacagagacaaggcccctgataccgattgggacctcgtgctgtacaagagcaccgatgacggcgtgaccttcagcaaggtggaaacaaacatccacgacatcgtgaccaagaacggcaccatctctgccatgctcggcggcgttggatctggcctgcaactgaatgatggcaagctggtgttccccgtgcagatggtccgaacaaagaatatcaccaccgtgctgaataccagcttcatctacagcaccgacggcatcacatggtccctgcctagcggctactgtgaaggctttggcagcgagaacaacatcatcgagttcaacgccagcctggtcaacaacatccggaacagcggcctgcggagaagcttcgagacaaaggacttcggaaagacgtggaccgagtttcctccaatggacaagaaggtggacaaccggaaccacggcgtgcagggcagcacaatcacaatccctagcggcaacaaactggtggccgctcactctagcgcccagaacaagaacaacgactacaccagaagcgacatcagcctgtacgcccacaacctgtacagcggcgaagtgaagctgatcgacgacttctaccccaaagtgggcaatgccagcggagccggctacagctgtctgagctaccggaaaaatgtggacaaagaaaccctgtacgtggtgtacgaggccaacggcagcatcgagtttcaggacctgagcagacatctgcccgtgatcaagagctacaac

SEQ ID NO: 7 - protein, 364 aa, Homo sapiens
ENDFGLVQPLVTMEQLLWVSGRQIGSVDTFRIPLITATPRGTLLAFAEARKMSSSDEGAKFIALRRSMDQGSTWSPTAFIVNDGDVPDGLNLGAVVSDVETGVVFLFYSLCAHKAGCQVASTMLVWSKDDGVSWSTPRNLSLDIGTEVFAPGPGSGIQKQREPRKGRLIVCGHGTLERDGVFCLLSDDHGASWRYGSGVSGIPYGQPKQENDFNPDECQPYELPDGSVVINARNQNNYHCHCRIVLRSYDACDTLRPRDVTFDPELVDPVVAAGAVVTSSGIVFFSNPAHPEFRVNLTLRWSFSNGTSWRKETVQLWPGPSGYSSLATLEGSMDGEEQAPQLYVLYEKGRNHYTESISVAKISV

SEQ ID NO: 8 - protein, 428 aa, Homo sapiens
MEEVTTCSFNSPLFRQEDDRGITYRIPALLYIPPTHTFLAFAEKRSTRRDEDALHLVLRRGLRIGQLVQWGPLKPLMEATLPGHRTMNPCPVWEQKSGCVFLFFICVRGHVTERQQIVSGRNAARLCFIYSQDAGCSWSEVRDLTEEVIGSELKHWATFAVGPGHGIQLQSGRLVIPAYTYYIPSWFFCFQLPCKTRPHSLMIYSDDLGVTWHHGRLIRPMVTVECEVAEVTGRAGHPVLYCSARTPNRCRAEALSTDHGEGFQRLALSRQLCEPPHGCQGSVVSFRPLEIPHRCQDSSSKDAPTIQQSSPGSSLRLEEEAGTPSESWLLYSHPTSRKQRVDLGIYLNQTPLEAACWSRPWILHCGPCGYSDLAALEEEGLFGCLFECGTKQECEQIAFRLFTHREILSHLQGDCTSPGRNPSQFKSN

SEQ ID NO: 9 - protein, 461 aa, Homo sapiens
MRPADLPPRPMEESPASSSAPTETEEPGSSAEVMEEVTTCSFNSPLFRQEDDRGITYRIPALLYIPPTHTFLAFAEKRSTRRDEDALHLVLRRGLRIGQLVQWGPLKPLMEATLPGHRTMNPCPVWEQKSGCVFLFFICVRGHVTERQQIVSGRNAARLCFIYSQDAGCSWSEVRDLTEEVIGSELKHWATFAVGPGHGIQLQSGRLVIPAYTYYIPSWFFCFQLPCKTRPHSLMIYSDDLGVTWHHGRLIRPMVTVECEVAEVTGRAGHPVLYCSARTPNRCRAEALSTDHGEGFQRLALSRQLCEPPHGCQGSVVSFRPLEIPHRCQDSSSKDAPTIQQSSPGSSLRLEEEAGTPSESWLLYSHPTSRKQRVDLGIYLNQTPLEAACWSRPWILHCGPCGYSDLAALEEEGLFGCLFECGTKQECEQIAFRLFTHREILSHLQGDCTSPGRNPSQFKSN

SEQ ID NO: 10 - protein, 484 aa, Homo sapiens
MGVPRTPSRTVLFERERTGLTYRVPSLLPVPPGPTLLAFVEQRLSPDDSHAHRLVLRRGTLAGGSVRWGALHVLGTAALAEHRSMNPCPVHDAGTGTVFLFFIAVLGHTPEAVQIATGRNAARLCCVASRDAGLSWGSARDLTEEAIGGAVQDWATFAVGPGHGVQLPSGRLLVPAYTYRVDRRECFGKICRTSPHSFAFYSDDHGRTWRCGGLVPNLRSGECQLAAVDGGQAGSFLYCNARSPLGSRVQALSTDEGTSFLPAERVASLPETAWGCQGSIVGFPAPAPNRPRDDSWSVGPGSPLQPPLLGPGVHEPPEEAAVDPRGGQVPGGPFSRLQPRGDGPRQPGPRPGVSGDVGSWTLALPMPFAAPPQSPTWLLYSHPVGRRARLHMGIRLSQSPLDPRSWTEPWVIYEGPSGYSDLASIGPAPEGGLVFACLYESGARTSYDEISFCTFSLREVLENVPASPKPPNLGDKPRGCCWPS

SEQ ID NO: 11 - protein, 496 aa, Homo sapiens
MMSSAAFPRWLSMGVPRTPSRTVLFERERTGLTYRVPSLLPVPPGPTLLAFVEQRLSPDDSHAHRLVLRRGTLAGGSVRWGALHVLGTAALAEHRSMNPCPVHDAGTGTVFLFFIAVLGHTPEAVQIATGRNAARLCCVASRDAGLSWGSARDLTEEAIGGAVQDWATFAVGPGHGVQLPSGRLLVPAYTYRVDRRECFGKICRTSPHSFAFYSDDHGRTWRCGGLVPNLRSGECQLAAVDGGQAGSFLYCNARSPLGSRVQALSTDEGTSFLPAERVASLPETAWGCQGSIVGFPAPAPNRPRDDSWSVGPGSPLQPPLLGPGVHEPPEEAAVDPRGGQVPGGPFSRLQPRGDGPRQPGPRPGVSGDVGSWTLALPMPFAAPPQSPTWLLYSHPVGRRARLHMGIRLSQSPLDPRSWTEPWVIYEGPSGYSDLASIGPAPEGGLVFACLYESGARTSYDEISFCTFSLREVLENVPASPKPPNLGDKPRGCCWPS

SEQ ID NO: 12 - protein, 5 aa, Homo sapiens
MASLP

SEQ ID NO: 13 - protein, 4 aa, Homo sapiens
ASLP

SEQ ID NO: 14 - protein, 8 aa, Salmonella typhimurium
TVEKSVVF

SEQ ID NO: 15 - protein, 12 aa, Homo sapiens
GDYDAPTHQVQW

SEQ ID NO: 16 - protein, 8 aa, Homo sapiens
SMDQGSTW

SEQ ID NO: 17 - protein, 8 aa, Salmonella typhimurium
STDGGKTW

SEQ ID NO: 18 - protein, 8 aa, Homo sapiens
PRPPAPEA

SEQ ID NO: 19 - protein, 8 aa, Homo sapiens
QTPLEAAC

SEQ ID NO: 20 - protein, 9 aa, Homo sapiens
NPRPPAPEA

SEQ ID NO: 21 - protein, 7 aa, Unknown
  Description of Unknown: Recombinant mutant human sialidase substitution sequence
SQNDGES

SEQ ID NO: 22 - protein, 7 aa, Unknown
  Description of Unknown: Recombinant mutant human sialidase substitution sequence
LSHSLST

SEQ ID NO: 23 - DNA, 1092 bp, Homo sapiens
gagaacgactttggactggtgcagcctctggtcaccatggaacagctgctgtgggtttccggcagacagatcggcagcgtggacaccttcagaatccctctgatcaccgccacacctagaggcaccctgctggcctttgccgaggccagaaagatgagcagctctgacgagggcgccaagtttattgccctgaggcggtctatggaccagggctctacatggtcccctaccgccttcatcgtgaacgatggcgacgtgcccgatggcctgaatctgggagctgtggtgtccgatgtggaaaccggcgtggtgttcctgttctacagcctgtgtgcccacaaggccggttgtcaggtggccagcacaatgctcgtgtggtccaaggacgacggcgtgtcctggtctacccctagaaacctgagcctggacatcggcaccgaagtgtttgctccaggacctggctctggcatccagaagcagagagagcccagaaagggcagactgatcgtgtgtggccacggcacccttgagagagatggcgttttctgcctgctgagcgacgatcatggcgcctcttggagatacggcagcggagtgtctggaatcccttacggccagcctaagcaagagaacgatttcaaccccgacgagtgccagccttacgagctgcctgatggcagcgtcgtgatcaacgcccggaaccagaacaactaccactgccactgccggatcgtgctgagaagctacgacgcctgcgataccctgcggcctagagatgtgaccttcgatcctgagctggtggaccctgttgttgccgctggtgccgtcgtgacatctagcggcatcgtgttcttcagcaaccctgctcaccccgagttcagagtgaatctgaccctgcggtggtccttcagcaatggcacaagctggcggaaagaaaccgtgcagctttggcctggacctagcggctactcttctctggctacactggaaggcagcatggacggcgaagaacaggcccctcagctgtacgtgctgtacgagaagggcagaaaccactacaccgagagcatcagcgtggccaagatcagcgtt

SEQ ID NO: 24 - DNA, 1140 bp, Homo sapiens
atggccagcctgcctgtgctgcagaaagaaagcgtgttccagtctggcgcccacgcctacagaattcccgctctgctgtatctgccaggccagcagtctctgctggctttcgctgaacagcgggccagcaagaaggatgagcacgccgaactgatcgtgctgcggagaggcgattacgacgcccctacacatcaggtgcagtggcaggctcaagaggtggtggctcaggctagactggacggccacagatctatgaacccctgtcctctgtacgatgcccagaccggcacactgtttctgttctttatcgctatccccggccaagtgaccgagcagcagcagctgcagacaagagccaacgtgaccagactgtgtcaagtgacctccaccgaccacggcagaacctggtctagccctagagatctgaccgacgccgccatcggacctgcctatagagagtggtccaccttcgccgttggacctggacactgtctccagctgcacgacagggctagatctctggtggtgcctgcctacgcctatagaaagctgcaccccatccagcggcctattcctagcgccttctgctttctgagccacgatcacggcaggacatgggccagaggacatttcgtggcccaggacacactggaatgccaggtggccgaagtggaaaccggcgagcagagagtcgtgaccctgaacgccagatctcacctgagagccagagtgcaggcccagagcacaaacgacggcctggatttccaagagagccagctggtcaagaaactggtggaacctcctccacagggctgtcagggaagcgtgatcagctttccatctcctagaagcggccctggctctcctgctcagtggctgctgtatacacaccccacacacagctggcagagagccgatctgggcgcctacctgaatcctagacctcctgctcctgaggcttggagcgaacctgttctgctggccaagggcagctgtgcctacagcgatctgcagtctatgggcacaggccctgatggcagccctctgtttggctgtctgtacgaggccaacgactacgaagagatcgtgttcctgatgttcaccctgaagcaggcctttccagccgagtacctgcctcaa

SEQ ID NO: 25 - DNA, 1284 bp, Homo sapiens
atggaggaagtgaccacctgtagcttcaacagccctctgttccggcaagaggacgaccggggcatcacctacagaatccctgctctgctgtacatccctcctacacacacctttctggccttcgccgagaagcggagcaccagacgagatgaagatgccctgcacctggtgctgagaagaggcctgagaatcggacagctggtgcagtggggacctctgaagcctctgatggaagccacactgcccggccacagaaccatgaatccttgtcctgtgtgggagcagaaaagcggctgcgtgttcctgttcttcatctgcgtgcggggccacgtgaccgagagacagcaaatcgtgtccggcagaaacgccgccagactgtgcttcatctacagccaggatgccggctgctcttggagcgaagttcgggatctgaccgaagaagtgatcggcagcgagctgaagcactgggccacatttgctgttggccctggccacggaatccagctgcaatctggcagactggtcatccccgcctacacctactatatccccagctggttcttctgcttccaactgccttgcaagacccggcctcacagcctgatgatctacagcgacgatctgggcgtgacatggcaccacggcagactgatcagacccatggtcaccgtggaatgcgaggtggccgaagtgacaggcagagctggacaccctgtgctgtactgctctgccagaacacccaaccggtgtagagccgaggctctgtctacagatcacggcgagggctttcagagactggccctctctagacagctgtgcgaacctcctcatggctgtcagggcagcgtggtgtccttcagacctctggaaatccctcaccggtgccaggacagcagctctaaggatgcccctaccatccagcagtctagccctggcagcagcctgagactggaagaggaagccggaacacctagcgagagctggctgctgtactctcaccccaccagcagaaagcagagagtggacctgggcatctacctgaatcagacccctctggaagccgcctgttggagcagaccttggattctgcactgtggcccttgcggctactctgatctggccgctctggaagaagagggcctgttcggctgcctgtttgagtgcggcacaaagcaagagtgcgagcagatcgccttccggctgttcacccacagagagatcctgagccatctgcagggcgactgcacaagcccaggcagaaatcccagccagttcaagagcaac

SEQ ID NO: 26 - DNA, 1452 bp, Homo sapiens
atgggcgtgcccagaacacccagcagaaccgtgctgttcgagagagagaggaccggcctgacctacagagtgccttctctgctgcctgtgcctcctggacctacactgctggccttcgtggaacagagactgagccccgatgattctcacgcccacagactggtgctgagaagaggaacactggctggcggctctgttagatggggagcactgcatgtgctgggcacagctgctcttgccgagcacagatccatgaatccctgtcctgtgcacgacgccggaaccggcacagtgtttctgttctttatcgccgtgctgggccacacacctgaggccgttcaaattgccaccggcagaaatgccgccagactgtgttgtgtggcctccagagatgccggcctgtcttggggatctgccagagatctgaccgaggaagccattggcggagccgttcaggattgggccacatttgctgttggacctggacacggcgtgcagctgccaagtggtagactgctggtgcctgcctacacatacagagtggatcggagagagtgcttcggaaagatctgccggacaagccctcacagcttcgccttctactccgacgatcacggccggacttggagatgtggtggcctggtgcctaatctgagaagcggcgaatgtcaactggccgccgttgatggtggacaggctggcagcttcctgtactgcaacgccagatctcctctgggctctagagtgcaggccctgtctaccgatgagggcaccagttttctgcccgccgaaagagttgcctctctgcctgaaacagcctggggctgtcagggctctatcgtgggatttcctgctcctgctccaaacagaccccgggacgattcttggagtgtcggccctggatctccactgcagcctccattgcttggaccaggcgttcacgagccacctgaagaggctgccgttgatcctagaggcggacaagttcctggcggcccttttagcagactgcagccaagaggcgacggccctagacaacctggaccaagacctggcgtcagcggagatgttggctcttggacactggccctgcctatgccttttgccgctcctcctcagtctcctacctggctgctgtactctcaccctgttggcagacgggccagactgcacatgggcatcagactgtctcagagccctctggaccccagaagctggacagagccttgggtcatctatgagggccctagcggctacagcgatctggcctctattggcccagctcctgaaggcggactggtgttcgcttgtctgtatgagagcggcgccagaaccagctacgacgagatcagcttctgcaccttcagcctgcgcgaggtgctggaaaatgtgcccgcctctcctaagcctcctaacctgggcgataagcctagaggctgttgctggccatct

SEQ ID NO: 27 - protein, 47 aa, Homo sapiens
MTGERPSTALPDRRWGPRILGFWGGCRVWVFAAIFLLLSLAASWSKA

SEQ ID NO: 28 - protein, 22 aa, Unknown
  Description of Unknown: N-terminal signal sequence
MDMRVPAQLLGLLLLWLPGARC

SEQ ID NO: 29 - protein, 4 aa, Unknown
  Description of Unknown: C-terminal lysosomal signal motif
YGTL

SEQ ID NO: 30 - protein, 382 aa, Salmonella typhimurium
MTVEKSVVFKAEGEHFTDQKGNTIVGSGSGGTTKYFRIPAMCTTSKGTIVVFADARHNTASDQSFIDTAAARSTDGGKTWNKKIAIYNDRVNSKLSRVMDPTCIVANIQGRETILVMVGKWNNNDKTWGAYRDKAPDTDWDLVLYKSTDDGVTFSKVETNIHDIVTKNGTISAMLGGVGSGLQLNDGKLVFPVQMVRTKNITTVLNTSFIYSTDGITWSLPSGYCEGFGSENNIIEFNASLVNNIRNSGLRRSFETKDFGKTWTEFPPMDKKVDNRNHGVQGSTITIPSGNKLVAAHSSAQNKNNDYTRSDISLYAHNLYSGEVKLIDDFYPKVGNASGAGYSCLSYRKNVDKETLYVVYEANGSIEFQDLSRHLPVIKSYN

SEQ ID NO: 31 - protein, 232 aa, Artificial Sequence
  Description of Artificial Sequence: Synthetic polypeptide
EPKSCDKTHTCPPCPAPELLGGPSVFLFPPKPKDTLMISRTPEVTCVVVDVSHEDPEVKFNWYVDGVEVHNAKTKPREEQYNSTYRVVSVLTVLHQDWLNGKEYKCKVSNKALPAPIEKTISKAKGQPREPQVYTLPPSREEMTKNQVSLTCLVKGFYPSDIAVEWESNGQPENNYKTTPPVLDSDGSFFLYSKLTVDKSRWQQGNVFSCSVMHEALHNHYTQKSLSLSPGK

SEQ ID NO: 32 - protein, 227 aa, Artificial Sequence
  Description of Artificial Sequence: Synthetic polypeptide
DKTHTCPPCPAPELLGGPSVFLFPPKPKDTLMISRTPEVTCVVVDVSHEDPEVKFNWYVDGVEVHNAKTKPREEQYNSTYRVVSVLTVLHQDWLNGKEYKCKVSNKALPAPIEKTISKAKGQPREPQVYTLPPSREEMTKNQVSLTCLVKGFYPSDIAVEWESNGQPENNYKTTPPVLDSDGSFFLTSKLTVDKSRWQQGNVFSCSVMHEALHNHYTQKSLSLSPGK

SEQ ID NO: 33 - protein, 232 aa, Artificial Sequence
  Description of Artificial Sequence: Synthetic polypeptide
EPKSCDKTHTCPPCPAPELLGGPSVFLFPPKPKDTLMISRTPEVTCVVVDVSHEDPEVKFNWYVDGVEVHNAKTKPREEQYNSTYRVVSVLTVLHQDWLNGKEYKCKVSNKALPAPIEKTISKAKGQPREPQVYTLPPSREEMTKNQVSLYCLVKGFYPSDIAVEWESNGQPENNYKTTPPVLDSDGSFFLYSKLTVDKSRWQQGNVFSCSVMHEALHNHYTQKSLSLSPGK

SEQ ID NO: 34 - DNA, 1383 bp, Homo sapiens
atgagacctgcggacctgcccccgcgccccatggaagaatccccggcgtccagctctgccccgacagagacggaggagccggggtccagtgcagaggtcatggaagaagtgacaacatgctccttcaacagccctctgttccggcaggaagatgacagagggattacctaccggatcccagccctgctctacataccccccacccacaccttcctggcctttgcagagaagcgttctacgaggagagatgaggatgctctccacctggtgctgaggcgagggttgaggattgggcagttggtacagtgggggcccctgaagccactgatggaagccacactaccggggcatcggaccatgaacccctgtcctgtatgggagcagaagagtggttgtgtgttcctgttcttcatctgtgtgcggggccatgtcacagagcgtcaacagattgtgtcaggcaggaatgctgcccgcctttgcttcatctacagtcaggatgctggatgttcatggagtgaggtgagggacttgactgaggaggtcattggctcagagctgaagcactgggccacatttgctgtgggcccaggtcatggcatccagctgcagtcagggagactggtcatccctgcgtatacctactacatcccttcctggttcttttgcttccagctaccatgtaaaaccaggcctcattctctgatgatctacagtgatgacctaggggtcacatggcaccatggtagactcattaggcccatggttacagtagaatgtgaagtggcagaggtgactgggagggctggccaccctgtgctatattgcagtgcccggacaccaaacaggtgccgggcagaggcgctcagcactgaccatggtgaaggctttcagagactggccctgagtcgacagctctgtgagcccccacatggttgccaagggagtgtggtaagtttccggcccctggagatcccacataggtgccaggactctagcagcaaagatgcacccaccattcagcagagctctccaggcagttcactgaggctggaggaggaagctggaacaccgtcagaatcatggctcttgtactcacacccaaccagtaggaaacagagggttgacctaggtatctatctcaaccagacccccttggaggctgcctgctggtcccgcccctggatcttgcactgtgggccctgtggctactctgatctggctgctctggaggaggagggcttgtttgggtgtttgtttgaatgtgggaccaagcaagagtgtgagcagattgccttccgcctgtttacacaccgggagatcctgagtcacctgcagggggactgcaccagccctggtaggaacccaagccaattcaaaagcaat

SEQ ID NO: 35 - DNA, 1488 bp, Homo sapiens
atgatgagctctgcagccttcccaaggtggctgagcatgggggtccctcgtaccccttcacggacagtgctcttcgagcgggagaggacgggcctgacctaccgcgtgccctcgctgctccccgtgccccccgggcccaccctgctggcctttgtggagcagcggctcagccctgacgactcccacgcccaccgcctggtgctgaggaggggcacgctggccgggggctccgtgcggtggggtgccctgcacgtgctggggacagcagccctggcggagcaccggtccatgaacccctgccctgtgcacgatgctggcacgggcaccgtcttcctcttcttcatcgcggtgctgggccacacgcctgaggccgtgcagatcgccacgggaaggaacgccgcgcgcctctgctgtgtggccagccgtgacgccggcctctcgtggggcagcgcccgggacctcaccgaggaggccatcggtggtgccgtgcaggactgggccacattcgctgtgggtcccggccacggtgtgcagctgccctcaggccgcctgctggtacccgcctacacctaccgcgtggaccgccgagagtgttttggcaagatctgccggaccagccctcactccttcgccttctacagcgatgaccacggccgcacctggcgctgtggaggcctcgtgcccaacctgcgctcaggcgagtgccagctggcagcggtggacggtgggcaggccggcagcttcctctactgcaatgcccggagcccactgggcagccgtgtgcaggcgctcagcactgacgagggcacctccttcctgcccgcagagcgcgtggcttccctgcccgagactgcctggggctgccagggcagcatcgtgggcttcccagcccccgcccccaacaggccacgggatgacagttggtcagtgggccccgggagtcccctccagcctccactcctcggtcctggagtccacgaacccccagaggaggctgctgtagacccccgtggaggccaggtgcctggtgggcccttcagccgtctgcagcctcggggggatggccccaggcagcctggccccaggcctggggtcagtggggatgtggggtcctggaccctggcactccccatgccctttgctgccccgccccagagccccacgtggctgctgtactcccacccagtggggcgcagggctcggctacacatgggtatccgcctgagccagtccccgctggacccgcgcagctggacagagccctgggtgatctacgagggccccagcggctactccgacctggcgtccatcgggccggcccctgaggggggcctggtttttgcctgcctgtacgagagcggggccaggacctcctatgatgagatttccttttgtacattctccctgcgtgaggtcctggagaacgtgcccgccagccccaaaccgcccaaccttggggacaagcctcgggggtgctgctggccctcc

SEQ ID NO: 36 - protein, 781 aa, Vibrio cholerae
MRFKNVKKTALMLAMFGMATSSNAALFDYNATGDTEFDSPAKQGWMQDNTNNGSGVLTNADGMPAWLVQGIGGRAQWTYSLSTNQHAQASSFGWRMTTEMKVLSGGMITNYYANGTQRVLPIISLDSSGNLVVEFEGQTGRTVLATGTAATEYHKFELVFLPGSNPSASFYFDGKLIRDNIQPTASKQNMIVWGNGSSNTDGVAAYRDIKFEIQGDVIFRGPDRIPSIVASSVTPGVVTAFAEKRVGGGDPGALSNTNDIITRTSRDGGITWDTELNLTEQINVSDEFDFSDPRPIYDPSSNTVLVSYARWPTDAAQNGDRIKPWMPNGIFYSVYDVASGNWQAPIDVTDQVKERSFQIAGWGGSELYRRNTSLNSQQDWQSNAKIRIVDGAANQIQVADGSRKYVVTLSIDESGGLVANLNGVSAPIILQSEHAKVHSFHDYELQYSALNHTTTLFVDGQQITTWAGEVSQENNIQFGNADAQIDGRLHVQKIVLTQQGHNLVEFDAFYLAQQTPEVEKDLEKLGWTKIKTGNTMSLYGNASVNPGPGHGITLTRQQNISGSQNGRLIYPAIVLDRFFLNVMSIYSDDGGSNWQTGSTLPIPFRWKSSSILETLEPSEADMVELQNGDLLLTARLDFNQIVNGVNYSPRQQFLSKDGGITWSLLEANNANVFSNISTGTVDASITRFEQSDGSHFLLFTNPQGNPAGTNGRQNLGLWFSFDEGVTWKGPIQLVNGASAYSDIYQLDSENAIVIVETDNSNMRILRMPITLLKQKLTLSQN

SEQ ID NO: 37 - DNA, 2424 bp, Vibrio cholerae
ttgtcaatcaagatgacttcacaacgaagaagagcatcgattcacaaggaaacagattctaatataaagggagtagatatgcgtttcaaaaacgtaaagaaaaccgctttaatgcttgcaatgttcggtatggcgacaagctcaaacgccgcactttttgactataacgcaacgggtgacactgagtttgacagtccagccaaacagggatggatgcaagacaacacgaataatggcagcggcgttttaaccaatgcagatggaatgcccgcttggttggtgcaaggtattggagggagagctcaatggacatattctctctctactaatcaacatgcccaagcatcaagtttcggttggcgaatgacgacagaaatgaaagtgctcagtggtggaatgatcacaaactactacgccaacggcactcagcgtgtcttacccatcatttcattagatagcagtggtaacttagttgttgagtttgaagggcaaactggacgcaccgttttggcaaccggcacagcagcaacggaatatcataaatttgaattggtattccttcctggaagtaacccatccgctagcttttacttcgatggcaaactcattcgtgacaacatccagccgactgcatcaaaacaaaatatgatcgtatgggggaatggctcatcaaatacggatggtgtcgccgcttatcgtgatattaagtttgaaattcaaggcgacgtcatcttcagaggcccagaccgtataccgtccattgtagcaagtagcgtaacaccaggggtggtaaccgcatttgcagagaaacgtgtggggggaggagatcccggtgctctgagtaataccaatgacataatcactcgtacctcacgagatggcggtataacttgggataccgagctcaacctcactgagcaaatcaatgtcagtgatgagtttgatttctccgatcctcggcctatctatgatccttcctccaatacggttcttgtctcttatgctcgatggccgaccgatgccgctcaaaacggagatcgaataaaaccatggatgccaaacggtattttttacagcgtctatgatgttgcatcagggaactggcaagcgcctatcgatgttaccgatcaggtgaaagaacgcagtttccaaatcgctggttggggtggttcagagctgtatcgccgaaataccagcctaaatagccagcaagactggcaatcaaacgctaagatccgaattgttgatggtgcagcgaaccagatacaagttgccgatggtagccgaaaatatgttgtcacactgagtattgatgaatcaggtggtctagtcgctaatctaaacggtgttagtgctccgattatcctgcaatctgaacacgcaaaggtacactctttccatgactacgaacttcaatattcggcgttaaaccacaccacaacgttattcgtggatggtcagcaaatcacaacttgggctggcgaagtatcgcaggagaacaacattcagtttggtaatgcggatgcccaaattgacggcagactgcatgtgcaaaaaattgttctcacacagcaaggccataacctcgtggagtttgatgctttctatttagcacagcaaacccctgaagtagagaaagaccttgaaaagcttggttggacaaaaattaaaacgggcaacaccatgagtttgtatggaaatgccagtgtcaacccaggaccgggtcatggcatcacccttactcgacaacaaaatatcagtggcagccaaaacggccgcttgatctacccagcgattgtgcttgatcgtttcttcttgaacgtcatgtctatttacagtgatgatggcggttcaaactggcaaaccggttcaacactccctatcccctttcgctggaagagttcgagtatcctagaaactctcgaacctagtgaagctgatatggttgaactccaaaacggtgatctactccttactgcacgccttgattttaaccaaatcgttaatggtgtgaactatagcccacgccagcaatttttgagtaaagatggtggaatcacgtggagcctacttgaggctaacaacgctaacgtctttagcaatatcagtactggtaccgttgatgcttctattactcggttcgagcaaagtgacggtagccatttcttactctttactaacccacaaggaaaccctgcggggacaaatggcaggcaaaatctaggcttatggtttagcttcgatgaaggggtgacatggaaaggaccaattcaacttgttaatggtgcatcggcatattctgatatttatcaattggattcggaaaatgcgattgtcattgttgaaacggataattcaaatatgcgaattcttcgtatgcctatcacattgctaaaacagaagctgaccttatcgcaaaactaa

SEQ ID NO: 38 - protein, 409 aa, Mus musculus
MVGADPTRPRGPLSYWAGRRGQGLAAIFLLLVSAAESEARAEDDFSLVQPLVTMEQLLWVSGKQIGSVDTFRIPLITATPRGTLLAFAEARKKSASDEGAKFIAMRRSTDQGSTWSSTAFIVDDGEASDGLNLGAVVNDVDTGIVFLIYTLCAHKVNCQVASTMLVWSKDDGISWSPPRNLSVDIGTEMFAPGPGSGIQKQREPGKGRLIVCGHGTLERDGVFCLLSDDHGASWHYGTGVSGIPFGQPKHDHDFNPDECQPYELPDGSVIINARNQNNYHCRCRIVLRSYDACDTLRPRDVTFDPELVDPVVAAGALATSSGIVFFSNPAHPEFRVNLTLRWSFSNGTSWLKERVQVWPGPSGYSSLTALENSTDGKKQPPQLFVLYEKGLNRYTESISMVKISVYGTL

SEQ ID NO: 39 - protein, 393 aa, Mus musculus
MTVQPSPWFSDLRPMATCPVLQKETLFRTGVHAYRIPALLYLKKQKTLLAFAEKRASKTDEHAELIVLRRGSYNEATNRVKWQPEEVVTQAQLEGHRSMNPCPLYDKQTKTLFLFFIAVPGRVSEHHQLHTKVNVTRLCCVSSTDHGRTWSPIQDLTETTIGSTHQEWATFAVGPGHCLQLRNPAGSLLVPAYAYRKLHPAQKPTPFAFCFISLDHGHTWKLGNFVAENSLECQVAEVGTGAQRMVYLNARSFLGARVQAQSPNDGLDFQDNRVVSKLVEPPHGCHGSVVAFHNPISKPHALDTWLLYTHPTDSRNRTNLGVYLNQMPLDPTAWSEPTLLAMGICAYSDLQNMGQGPDGSPQFGCLYESGNYEEIIFLIFTLKQAFPTVFDAQ

SEQ ID NO: 40 - protein, 418 aa, Mus musculus
MEEVPPYSLSSTLFQQEEQSGVTYRIPALLYLPPTHTFLAFAEKRTSVRDEDAACLVLRRGLMKGRSVQWGPQRLLMEATLPGHRTMNPCPVWEKNTGRVYLFFICVRGHVTERCQIVWGKNAARLCFLCSEDAGCSWGEVKDLTEEVIGSEVKRWATFAVGPGHGIQLHSGRLIIPAYAYYVSRWFLCFACSVKPHSLMIYSDDFGVTWHHGKFIEPQVTGECQVAEVAGTAGNPVLYCSARTPSRFRAEAFSTDSGGCFQKPTLNPQLHEPRTGCQGSVVSFRPLKMPNTYQDSIGKGAPATQKCPLLDSPLEVEKGAETPSATWLLYSHPTSKRKRINLGIYYNRNPLEVNCWSRPWILNRGPSGYSDLAVVEEQDLVACLFECGEKNEYERIDFCLFSDHEVLSCEDCTSPSSD

SEQ ID NO: 41 - protein, 501 aa, Mus musculus
METAGAPFCFHVDSLVPCSYWKVMGPTRVPRRTVLFQRERTGLTYRVPALLCVPPRPTLLAFAEQRLSPDDSHAHRLVLRRGTLTRGSVRWGTLSVLETAVLEEHRSMNPCPVLDEHSGTIFLFFIAVLGHTPEAVQIATGKNAARLCCVTSCDAGLTWGSVRDLTEEAIGAALQDWATFAVGPGHGVQLRSGRLLVPAYTYHVDRRECFGKICWTSPHSLAFYSDDHGISWHCGGLVPNLRSGECQLAAVDGDFLYCNARSPLGNRVQALSADEGTSFLPGELVPTLAETARGCQGSIVGFLAPPSIEPQDDRWTGSPRNTPHSPCFNLRVQESSGEGARGLLERWMPRLPLCYPQSRSPENHGLEPGSDGDKTSWTPECPMSSDSMLQSPTWLLYSHPAGRRARLHMGIYLSRSPLDPHSWTEPWVIYEGPSGYSDLAFLGPMPGASLVFACLFESGTRTSYEDISFCLFSLADVLENVPTGLEMLSLRDKAQGHCWPS

SEQ ID NO: 42 - DNA, 3850 bp, Mus musculus
gggtcacatgctgatggactaattggagtcgcggcagcgcgggctgcggcccccaaggggaggggtcggagtgacgtgcgcgcttttaaagggccgaggtcagctgacggcttgccaccggtgaccagttcctggacagggatcgccgggagctatggtgggggcagacccgaccagaccccggggaccgctgagctattgggcgggccgtcggggtcaggggctcgcagcgatcttcctgctcctggtgtccgcggcggaatccgaggccagggcagaggatgacttcagcctggtgcagccgctggtgaccatggagcagctgctgtgggtgagcgggaagcagatcggctctgtagacactttccgcatcccgctcatcacagccacccctcggggcacgctcctggccttcgctgaggccaggaaaaaatctgcatccgatgagggggccaagttcatcgccatgaggaggtccacggaccagggtagcacgtggtcctctacagccttcatcgtagacgatggggaggcctccgatggcctgaacctgggcgctgtggtgaacgatgtagacacagggatagtgttccttatctataccctctgtgctcacaaggtcaactgccaggtggcctctaccatgttggtttggagtaaggacgacggcatttcctggagcccaccccggaatctctctgtggatattggcacagagatgtttgcccctggacctggctcaggcattcagaaacagcgggagcctgggaagggccggctcattgtgtgtggacacgggacgctggagcgagatggggtcttctgtctcctcagtgatgaccacggtgcctcctggcactacggcactggagtgagcggcattccctttggccagcccaaacacgatcacgatttcaaccccgacgagtgccagccctacgagcttccagatggctcggtcatcatcaacgcccggaaccagaataactaccattgccgctgcaggatcgtcctccgcagctatgacgcctgtgacaccctcaggccccgggatgtgaccttcgaccctgagctcgtggaccctgtggtagctgcaggagcactagccaccagctccggcattgtcttcttctccaatccagcccaccctgagttccgagtgaacctgaccctgcgctggagtttcagcaatggtacatcctggcagaaggagagggtccaggtgtggccgggacccagcggctactcgtccctgacagccctggaaaacagcacggatggaaagaagcagcccccgcagctgttcgttctgtacgagaaaggcctgaaccggtacaccgagagcatctccatggtcaaaatcagcgtctacggcacgctctgagccccgtgcccaaaggacaccaagtcctggtcgctgacttcacagctctctggaccatctgcagagggtgcctgaaacacagctcttcctctgaactctgaccttttgcaacttctcatcaacagggaagtctcttcgttatgacttaacacccagcttcctctcggggcaggaagtccctccgtcaccaagagcacttttttccagtatgctggggatggcccctgtccattctcttccaggacaacggagctgtgcctttctgggacaggatgggggaggggctccccctggagagatgaacagatacgaactcagggaactgagaaggcccggtgtcctagggtacaaaggcaggtactagatgtgattgctgaaagtccccagggcagagtgtcctttcagagcaaggataagcacacctacgtgtgcacctttgattatttatgaatcgaaatatttgtaacttaaaatttttgatgcagaaaaagcgtttgtggagtctgtggttctgtctgctcacgccttcccaattgcctcctggagagacaggaaggcagctggaagaggagccgatgtacttactgggaagcagaaacccctagattccatcctggctgctgctgtttgcaagtgtcaaagatgggggggcgtgtttatattttatatttctaagatggggtggcataggaaatagggaacagatgtgtaaaaccagatgggaaggacagtctgtgagaaaggagcaagcagttgctgcaggtgtgggagagcaaagcccttctccacgtggaaagagcccagatggacgctaagcatgttgggcacctgtaaccccgcactcgctggactgacggtgtagctcagtggtggagctagtacttggaacgcctaagactctgggttcagtccttgggggggggggtatgtgtttattgagaggaaggtgtacgtactgtaggtcagaggacagcttactggagttgtctctctccttcacgctgtgagtcctgtggaatgacctcaggtgtcagagttgggggcaggtgcctttgccagctgagccatcttgctgtctctgctttaatttaaaaaaaaaaaaaaaaaagaatattaaggtctgagggattcgggctgcgttcatttcaattagagggtcatatttcttttgacatttcttctctaagaaatgttaagatcatttgttctgtgtgatagaggtatagctccattgtatgtcagcagtgagggatcctgtgcattttatccagagtttgtacggtgttctaggggctgctagtgcagcccagtgctaaacacttcagcatgcacaaggcctcaatcagtgcatgcatgtgcacacacacacagacacacacgtacacactgacacaggtacacaaatacacactggcccacatgtacacatcgactcacaggtacacagacccactttgacacacatatacacagacacaaacgcactggcacacacatatacacaggcacacatggatagatggacacacgtgtacacatacacacacacacagaaatacaaatgttcaggttttctaaaaaaaaaaaaattagagacgtgttgacttcatttttagcaaaaatcctgtcatgtatcttaaagtggattgaacccactatgtagcccaggctggcctccaaatgggcatccttctgcctcagtctcccgagggctaggataacaggagtatgccatcacacctggctaatagaaattttcaaaattgtttgtttgaaggtgactcttactatattgcctaactgatctccagttcgtgaaatcctcctgcctcagaaccaggactgtcaatataacccaccaagacaggccaacattcacaattgattgttagtttgtggtctgaatcaaggtcttatactgtagcccaggctagcccggaatacacgatatctccagtgcttcagatcctcagttctaactaagcatggccacatccatgtttaactgcaaatttgatgttaccatggtttggtttggtttggtttggtttggtttggtttggtttggttttttggccattttttttttctcatgctgaggccttgtgctctcaagttggggagacagcatggagggtagctgcaactgtaaccccagttccaggggacctgacaccctctggcctccacaagtattaggcacatctgtggtgcacagacatacaatcaggcaaaatattcatacacataaaataaaataatttaaaacaaaagcaaaaatcaggacctaagaaaaaaatctattcctgattcttttatgttttgtttgtattttatcaagacagggttgtttctctgtatagccctggctgtcttggaattcactctgtagaccaggctggcctcaaactcagaaatcctcctgcctttgccttccaagtgctggaattaaaggcatgcgccacc

SEQ ID NO: 43 - DNA, 1722 bp, Mus musculus
gacatgacccaaacggcccctggctgcaaggtaatatcggaagttgactaagaatggacgccccaccactgactgacccgccccctgagtctgagattggacttgtctctggatacagtcatactttgaggtactacaagttagaaactgttaggttactcagttcagtccatgacagtccaaccttctccatggttttccgatctcaggcccatggcgacctgccctgtcctgcagaaggagacactgttccgcacaggcgtccatgcttacagaatccctgctctgctctacctgaagaagcagaagaccctgctggcctttgcggaaaagcgagccagcaagacggatgagcacgcagagttgattgtcctgagaagaggaagctacaacgaagccaccaaccgtgtcaagtggcagcctgaggaagtggtgacccaagcccagctggaaggccaccgctccatgaatccatgtcccttgtatgacaagcaaacaaagaccctcttccttttcttcatcgctgtccctgggcgtgtatcagaacatcatcagctccacactaaggttaatgtcacacggctgtgctgtgtcagcagcactgaccatgggaggacctggagccccatccaggacctcacagagaccaccattggcagcactcatcaggaatgggccacatttgctgtgggtcctgggcattgtctgcagctgcggaacccagctgggagcctgctggtacctgcttatgcctaccggaaactgcaccctgctcagaagcctaccccctttgccttctgcttcatcagccttgaccatgggcacacatggaaactaggcaactttgtggctgaaaactcactggagtgccaggtggctgaggttggcactggagctcagaggatggtatatctcaatgctaggagcttcctgggagccagggtccaggcacaaagtcctaatgatggtctggatttccaggacaaccgggtagtgagtaagcttgtagagcccccccacgggtgtcatggaagtgtggttgccttccacaaccccatctctaagccacatgccttagacacatggcttctttatacacaccctacagactccaggaatagaaccaacctgggtgtgtacctaaaccagatgccactagatcccacagcctggtcagagcccaccctgctggccatgggcatctgtgcctactcagacttacagaacatggggcaaggccctgatggctccccacagtttgggtgtctgtatgaatcaggtaactatgaagagatcattttcctcatattcaccctgaagcaagctttccccactgtatttgatgcccagtgatctcagtgcacgtggcccaaagggcttccttgtgcttcaaaacacccatctctctttgcttccagcatcctctggactcttgagtccagctcttgggtaacttcctcaggaggatgcagagaatttggtctcttgactctctgcaggccttattgtttcagcctctggttctcttttcagcccagaaatcaaaggagcctggctttcctcagcctgttggcagggcaggtggggacagtatatatagaggctgccattctgcatgtcggttgtcactatgctagtttaacctgcctgtttccccatgcctagtgtttgaatgagtattaataaaatatccaacccagcccatttcttcctggaaaaaaa

SEQ ID NO: 44 - DNA, 3340 bp, Mus musculus
actgcgcggtgaaggggcgtggcctggccggggaggttgacacccagacgctgctctcagtcctctggcgcctgctccccagcgcattccttctgctcctgggatatttgtctcattactgccagttcttgcgcagcggtcactgggttcgtttcagcgtctgtggtttctgtcgctgttatccagtctccatcgccccagctcagcttcaggccttcttccgagactccacgggagagcccagagagcctccggagccgaagccatggaggaagtcccaccctactccctcagcagcaccctgttccagcaggaagaacagagtggggtgacctaccggatcccagccctgctgtaccttcctcccacccacaccttcctggcctttgcagagaagcggacctcagtcagagatgaggatgctgcctgcctggtgctcagacgagggctgatgaaggggcgctctgtacagtggggcccccaacggctactgatggaggccacattacctgggcatcgcaccatgaacccctgccctgtgtgggagaaaaatactggccgtgtgtacctgtttttcatctgtgtgcggggccatgttactgagaggtgccagattgtgtggggcaaaaatgccgcccgtctctgcttcctttgcagtgaagatgccggctgctcttggggtgaagtgaaagacttgaccgaggaggtcattggctcagaggtgaagcgctgggccacatttgctgtgggcccaggtcatggcatccagctacactcgggaaggctgatcatccccgcctatgcctactatgtctcacgttggtttctctgctttgcgtgttcagtcaagccccattccctgatgatctacagtgatgactttggagtcacatggcaccatggcaagttcattgagccccaggtgacaggggagtgccaagtggccgaagtggctgggacggctggtaaccctgtgctcactgcagtgcccgaacaccaagccgatttcgagcagaggcttttagtactgatagtggtggctgctttcagaagccaaccctgaacccacaactccatgagcctcgaaccggctgccaaggtagtgtagtgagcttccggcctttgaagatgccaaatacctatcaagactcaattggcaaaggtgctcccgctactcagaagtgccctctgctggacagtcctctggaggtggagaaaggagctgaaacaccatcagcaacatggctcttgtactcacatccaactagcaagaggaagaggattaacctaggcatctactacaaccggaaccccttggaggtgaactgctggtcccgcccgtggatcttgaaccgtgggcccagtggctactctgatctggctgttgtggaagaacaggacttggtggcgtgtttgtttgagtgtggggagaagaatgagtatgagcggattgacttctgtctgttttcagaccatgaggtcctgagctgtgaagactgtaccagccctagtagcgactaaagccaaatcaagacggatgagtgaggcccagcttcccacagaaaggaatggcagctacagccagggtaacagaggtctctgatgtctagagaaaactctaaaaactaataatctgctccttgaattttttcacttttcccttcaatgagcatggtgaaaattgtgccatatcttacataacgaggctcttgaactgggagtttgaatctcttctcttcccattaaaaggagaggccatgtgctcgcttcgcgttcgacaaagcctggattctgatcttgagtggaagccacaggcttgtcttttccaatggttcactgctcacctgagtattaggtgatgtgtaggtgccttggccagaagaaagatctgtgttgttgtatttttttaaatttatttatttactatatgtaagtacactgcagctgtcttcagacacaccagaagagggcgtcagatctcattagagatggttgtgagccaccatgtggttgctgggatttgaactcaggaccttcagaagagcagtcagtgctcttaactactgagccatctctcaagccccgcattgctgtatttttaataagaaaaatgcccttatccttccaataatgcctggagctgtacaaattctctgtcttagaagacttgagaaagcagaactgtaaggtcagatgctttctccagccttgatgctgtgttccaccttcccttcctcatccagaaaacagttactagggagaaaatgagaaacccatgccagctgcccttgatgatggttgataacggtgcttattgcttttgatgtcattacctctgttagagatgaatcagagtcagaggtccttagctgcatccacccatttccagggggacattctaacactgctgaacagtcagctaaaatgagagctgtgtgtcctagcctgattccaggttagtcatgatgcttcctggagctgggcttttatctaatcccaggagccatctaggggaggctcagagctagcaggtgatcttcctgagatggtttcaccgtgacaggtgaaccatgagcccttccaagcaaggccaaaggacaacattataggaaagatttctagtattaatatgccttttctctgtgtgtgtactgtcttgtagtgatgctatatagacaaatagatgatttcttattttttgtttgtttgtttgtttttttgtttttctgtagccctagctgtcctggaactcactttgtaaaccaggctggcctcgatctcagaaatccgcctgcctctgcctcccgagtgctgggattaaaggtgtgcaccaccacaccttaatgatgatcctataagtattcctaaaattatactagtaattattaactcctttataataggactgctattaaagccctcgctgatatgaaaactacagtgagaactctgccagtcttcacatgtcataattacttctgagatagaaagcaggcatttacaacttagaacacatttcttagagctgtaaaacaattaactagaggtcataaaagggaatgaaagatttattgtaggtgctaggacagaacataaaatattgactgggcttatctatatgaaacttcattgttaacttttacacaagaattatggtttttaactttcagtgaacctgcggagctagtgacagaagagaaatgtctagttagataactactcttaatggaaattcacataaacatctgttgccatcttctttttgaatttatgtttaaacttgtgaatgtttgaattagacactacgcgagcacatagaaaataaagaactaagcgtgaa

SEQ ID NO: 45 - DNA, 4608 bp, Mus musculus
ggacagtgtgcatcacggagcttgtggcccagactgtgcctggcagacccagaggacctaaggcttggctctagtggtggtcagcacagccctcggtggtctgcggagcctgatattgctttacgtaagggctgttctgctgtgcatctcctgtgtctgaagctattcgccatggagactgctggagctcccttctgcttccatgtggactccctggtaccttgctcctactggaaggttatggggcccacgcgtgttcccaggagaacggtgctcttccagagggaaaggacgggcctgacctaccgtgtgcctgcgttactctgtgtgcctcccaggcctactctgctggccttcgcggaacagcgacttagccctgatgactcccatgcccaccgcctggtgctacggaggggcacgctgaccaggggctcagtgcggtggggcactctgagtgtactggagactgcagtactggaggagcacaggtctatgaacccttgcccggtgctggatgagcactctggtaccatcttcctcttcttcattgccgtgctgggccacacaccggaggccgtgcaaatcgccactggcaagaacgctgctcgcctctgctgtgtgaccagctgtgacgctggcctcacctggggcagtgttcgagatctcactgaggaagccattggtgctgcattgcaggactgggccacctttgctgtgggtccgggccatggagttcagctgcgctcgggtcgcctgcttgttcctgcttacacctatcatgtggaccgacgggaatgttttggcaagatctgctggaccagtccccactccttggcattctacagtgatgatcatgggatctcctggcattgtggaggccttgtgcccaacctacgctctggagagtgccaactggctgcggtagatggagactttctctactgtaatgctcgaagccctctgggtaaccgtgtgcaggcactgagtgctgatgaaggcacgtccttcctaccaggggagctggtgcctacattggcagagacggctcgtggttgccagggtagcattgtgggcttcctagctccaccctcaatcgagcctcaggatgaccggtggacagggagtcctaggaacaccccacattccccatgcttcaatctcagagtacaggagtcttcgggggaaggtgccagaggtcttcttgaacgttggatgcccaggttgcctctctgctacccacagtcccggagcccagagaatcatggcctagagcctgggtcagatggagataagacatcctggactccggaatgtcctatgtcctctgattccatgcttcagagccccacatggctactatattcccacccagcagggcgtagagctcggctccacatgggaatctacctgagccgatcccccttggatccccacagctggacagagccctgggtgatctatgagggccccagtggctactctgaccttgcctttcttgggcctatgcctggggcatccctggtttttgcctgtctgtttgagagcgggaccaggacttcctatgaagacatttctttttgcttgttctcactggcggatgtcctggagaatgtgcccactggcttagagatgctaagtctcagggataaggctcaggggcattgctggccctcttgatggcctcaccctctcgtagccgcctggagaggaagggtagactatatagaggaggttaggggtaggtcagcatgatgctaggatggagagagctctgtcccctcgtggatggtggtggtgactcacccggggggccagctgctttctgagtgcaaatgagaaaaataaagagctgcgctgtgacttttctttccacatcaaagcttgggtgtcagtgctttagcttgatgctctgatcaccatgcaaatcttccaccggcgccttgctcagctttcatatcccaagggtgcctgggaggaaggcaacagggacagtggacatcactgcaccactttccacgaccctgtgtgccaacctcagccactttgaaacatgctgatgactgaggtctgttcactttcttaatttcaagcaggagaagcaggttggggagccagcctccccagctagaggggacagaacttgacttgagcaggggggtacctcctaggacctgctccatgtgcctacttctttacccttctctagagagggctcttgtcctgtcagagctgttttctcccttctcttgttttttctttttcaagactgtttctctgtgttagccctggctgtcctggatctcactctgtagatcaggctgaccttgagttcaaagctccatctgcctctacttctcacattactgtgattaaaggcatatactaccactgcctggtgcccttttgtatttcttattaaagtcctaatgtctgattataaaaacagtctgtgtgggctggagtgatggcttactcagtaaagcacttgccatggaatctgggcaatctgagtttcatttttagcatcctgtaaaaatcccaatttgatggtgtacttgtaatgtcagcatggagaggcagagataggtaagttccccaagactctttgaaccgacagcttggcctcactggcacattccaggtctcagtgagagaccctgcctcaaaatacaaagaaagagctgctgaagagtgggtcagagttgacctctgatctccggaagtatatgatacacacccgtgcatgcactcttccttacaaaataaaaagcaaaacaaaaccccaacaggtatatggccattttagaaaaattagaagatttagaaagctatacataaaaaaaaatgacctaaagaaaaatctttactgttctgggcactatccctatcaaaccactgtgttctttggccaagccttggggtggacactgttttgaggtgggtcctgttatctccactaggtagtggagttttgtgtcagactaactgggtcttaaagctgtctttaaggccatcaggagctactgacttgcctgcctcagcagagcatatcctgaaggtcggggttaagtctccttcccgagcgagttgccttccagtgggcccctggactcctaggtcctcagcgctcatcagctgccaaggactctgagggaatgtcctctgactgtggccccgaaaggtaggggagggggatgtgcttaggcttaggacagggtcctgtttcagtctgccttcactgttagtagcactgtgccacatggcacagactgggcgagctttaaaggaaggaggttgatattggttcccacttctggggatcatggttgagcagccttgtctgatgatggttgtcttgatggtagatcgtgaggtagttgatgaaggtatgacatggtgagaaactctgtgtgtgtgtgttattttctctgtgttctacctatacatctatctatgtatatatgtatctatctatctacctggaggctggagagatagcttagtggttaagaacatttgttgttcttgcatagtcctggatttaaattttcagcacccacatggcagctcacaacaacccataaatccagtttcagaggatccaacctctgatataccatgtcagccagagcagacacggctgaaggtggtttgatccccgtatggagaggtgacaattgggaagagagaaagatcaacttaaccatgcaaggaacaggaagttaaatactgaacagggaaggtaaaggcaggaagtagatgtagagggcaaatcaatgaaacccaaacatacccaaattacgctaaacacacactgacatgccaattaaaaggacaaattggctccactggcaaaaccaaaacagacactgaagatccaaacagtcacatgccaactaccgcggagggagacagacacagagaagaccgtgacagacacttggacactcttgagagtggatgtgcaggaagagagctctgccagtggagaagaaagcactcagaagaaagtgacagcagctgtaaatttgtattctgctaatgttatgttccaaagttgaaagcaaaattgtaccaattcataagaacaaacaggctgactctcagttgtgactgaacgtctctcagtaactgacggggcgagcaggccaaaggagagtcggctcagaagggtgcatagccacgccaaatcaaataagcaagtacaaccggcaggctctatttctagcacaaaggggtctgtgcctcattctgtgcttgggtcagagcttgggtctctcatttggatgtaagtggtgtagtggagaagcaggaaataatccggagcgcatattttgattttaacataagtgctgatttgggagggagttttgtcaaattgtgtttttacaatgtttttttttttttaaatgatgcttttttgtaaagtgtacaaatgtgatataagattggttctgctacattcagtttctataaaagtggttctaaaatattgtactgtcaatcatctcatgattattctactgtacacattactgactttgtatgtaataattaatattagaagaaaatataatttatttgaatataaaaaaaaaaaaaaaaaaa

SEQ ID NO: 46 - protein, 380 aa, Artificial Sequence
  Description of Artificial Sequence: Synthetic polypeptide
  MOD_RES (1)..(1): Ala, Arg, Asn, Asp, Gln, Glu, Gly, His, Leu, Lys, Met, Phe, Thr, Val, or not present
  MOD_RES (6)..(6): Phe, Trp, Tyr or Val
  MOD_RES (9)..(9): Lys or Asp
  MOD_RES (62)..(62): Pro, Asn, Asp, His, Glu, Gly, Ser or Thr
  MOD_RES (93)..(93): Ala, Glu, or Lys
  MOD_RES (187)..(187): Arg, Ile, or Lys
  MOD_RES (270)..(270): Gln, Ala, His, Phe, or Pro
  MOD_RES (301)..(301): Ser or Arg
  MOD_RES (302)..(302): Trp or Lys
  MOD_RES (332)..(332): Ala, Cys, Ser, or Val
  MOD_RES (363)..(363): Val or Arg
  MOD_RES (365)..(365): Leu, Gln, His, Ile, Lys, or Ser
  See specification as filed for detailed description of substitutions and preferred embodiments
XASLPXLQXESVFQSGAHAYRIPALLYLPGQQSLLAFAEQRASKKDEHAELIVLRRGDYDAXTHQVQWQAQEVVAQARLDGHRSMNPCPLYDXQTGTLFLFFIAIPGQVTEQQQLQTRANVTRLCQVTSTDHGRTWSSPRDLTDAAIGPAYREWSTFAVGPGHCLQLHDRARSLVVPAYAYRKLHPXQRPIPSAFCFLSHDHGRTWARGHFVAQDTLECQVAEVETGEQRVVTLNARSHLRARVQAQSTNDGLDFQESQLVKKLVEPPPXGCQGSVISFPSPRSGPGSPAQWLLYTHPTHXXQRADLGAYLNPRPPAPEAWSEPVLLAKGSXAYSDLQSMGTGPDGSPLFGCLYEANDYEEIXFXMFTLKQAFPAEYLPQ

SEQ ID NO: 47 - protein, 380 aa, Artificial Sequence
  Description of Artificial Sequence: Synthetic polypeptide
  MOD_RES (1)..(1): Ala, Arg, Asn, Asp, Gln, Glu, Gly, His, Leu, Lys, Met, Phe, Thr, Val, or not present
  MOD_RES (2)..(2): Ala or Lys
  MOD_RES (4)..(4): Asn or Leu
  MOD_RES (5)..(5): Pro or His
  MOD_RES (6)..(6): Phe, Trp, Tyr or Val
  MOD_RES (9)..(9): Lys or Asp
  MOD_RES (44)..(44): Lys, Arg, or Glu
  MOD_RES (45)..(45): Lys, Ala, Arg, or Glu
  MOD_RES (54)..(54): Leu or Met
  MOD_RES (62)..(62): Pro, Asn, Asp, His, Glu, Gly, Ser or Thr
  MOD_RES (69)..(69): Gln or His
  MOD_RES (78)..(78): Arg or Lys
  MOD_RES (93)..(93): Ala, Glu or Lys
  MOD_RES (107)..(107): Gly or Asp
  MOD_RES (108)..(108): Gln or His
  MOD_RES (112)..(112): Gln, Arg, or Lys
  MOD_RES (125)..(125): Ala, Cys, Ile, Ser, Val, or Leu
  MOD_RES (126)..(126): Gln or Leu
  MOD_RES (150)..(150): Ala or Val
  MOD_RES (164)..(164): Cys or Gly
  MOD_RES (171)..(171): Ala or Gly
  MOD_RES (187)..(187): Arg, Ile, or Lys
  MOD_RES (196)..(196): Ala, Cys, Leu, or Val
  MOD_RES (217)..(217): Leu, Ala, or Val
  MOD_RES (249)..(249): Thr or Ala
  MOD_RES (251)..(251): Asp or Gly
  MOD_RES (257)..(257): Glu or Lys
  MOD_RES (270)..(270): Gln, Ala, His, Phe, or Pro
  MOD_RES (272)..(272): Cys or Val
  MOD_RES (292)..(292): Trp or Arg
  MOD_RES (301)..(301): Ser or Arg
  MOD_RES (302)..(302): Trp or Lys
  MOD_RES (325)..(325): Lys or Val
  MOD_RES (332)..(332): Ala, Cys, Ser, or Val
  MOD_RES (352)..(352): Cys, Leu, or Val
  MOD_RES (363)..(363): Val or Arg
  MOD_RES (365)..(365): Leu, Gln, His, Ile, Lys, or Ser
  See specification as filed for detailed description of substitutions and preferred embodiments
XXSXXXLQXESVFQSGAHAYRIPALLYLPGQQSLLAFAEQRASXXDEHAELIVXRRGDYDAXTHQVQWXAQEVVAQAXLDGHRSMNPCPLYDXQTGTLFLFFIAIPXXVTEXQQLQTRANVTRLXXVTSTDHGRTWSSPRDLTDAAIGPXYREWSTFAVGPGHXLQLHDRXRSLVVPAYAYRKLHPXQRPIPSAFXFLSHDHGRTWARGHFVAQDTXECQVAEVETGEQRVVTLNARSHLRARVQAQSXNXGLDFQXSQLVKKLVEPPPXGXQGSVISFPSPRSGPGSPAQXLLYTHPTHXXQRADLGAYLNPRPPAPEAWSEPXLLAKGSXAYSDLQSMGTGPDGSPLFGXLYEANDYEEIXFXMFTLKQAFPAEYLPQ

SEQ ID NO: 48 - protein, 380 aa, Artificial Sequence
  Description of Artificial Sequence: Synthetic polypeptide
DASLPYLQKESVFQSGAHAYRIPALLYLPGQQSLLAFAEQRASKKDEHAELIVLRRGDYDAGTHQVQWQAQEVVAQARLDGHRSMNPCPLYDEQTGTLFLFFIAIPGQVTEQQQLQTRANVTRLCQVTSTDHGRTWSSPRDLTDAAIGPAYREWSTFAVGPGHCLQLHDRARSLVVPAYAYRKLHPKQRPIPSAFCFLSHDHGRTWARGHFVAQDTLECQVAEVETGEQRVVTLNARSHLRARVQAQSTNDGLDFQESQLVKKLVEPPPQGCQGSVISFPSPRSGPGSPAQWLLYTHPTHSWQRADLGAYLNPRPPAPEAWSEPVLLAKGSAAYSDLQSMGTGPDGSPLFGCLYEANDYEEIVFLMFTLKQAFPAEYLPQ

SEQ ID NO: 49 - protein, 380 aa, Artificial Sequence
  Description of Artificial Sequence: Synthetic polypeptide
DASLPYLQDESVFQSGAHAYRIPALLYLPGQQSLLAFAEQRASKKDEHAELIVLRRGDYDAPTHQVQWQAQEVVAQARLDGHRSMNPCPLYDEQTGTLFLFFIAIPGQVTEQQQLQTRANVTRLCQVTSTDHGRTWSSPRDLTDAAIGPAYREWSTFAVGPGHCLQLHDRARSLVVPAYAYRKLHPKQRPIPSAFCFLSHDHGRTWARGHFVAQDTLECQVAEVETGEQRVVTLNARSHLRARVQAQSTNDGLDFQESQLVKKLVEPPPQGCQGSVISFPSPRSGPGSPAQWLLYTHPTHSWQRADLGAYLNPRPPAPEAWSEPVLLAKGSAAYSDLQSMGTGPDGSPLFGCLYEANDYEEIRFIMFTLKQAFPAEYLPQ

SEQ ID NO: 50 - protein, 380 aa, Artificial Sequence
  Description of Artificial Sequence: Synthetic polypeptide
DASLPYLQKESVFQSGAHAYRIPALLYLPGQQSLLAFAEQRASKKDEHAELIVLRRGDYDANTHQVQWQAQEVVAQARLDGHRSMNPCPLYDAQTGTLFLFFIAIPGQVTEQQQLQTRANVTRLCQVTSTDHGRTWSSPRDLTDAAIGPAYREWSTFAVGPGHCLQLHDRARSLVVPAYAYRKLHPKQRPIPSAFCFLSHDHGRTWARGHFVAQDTLECQVAEVETGEQRVVTLNARSHLRARVQAQSTNDGLDFQESQLVKKLVEPPPQGCQGSVISFPSPRSGPGSPAQWLLYTHPTHSWQRADLGAYLNPRPPAPEAWSEPVLLAKGSAAYSDLQSMGTGPDGSPLFGCLYEANDYEEIVFLMFTLKQAFPAEYLPQ

SEQ ID NO: 51 - protein, 380 aa, Artificial Sequence
  Description of Artificial Sequence: Synthetic polypeptide
DASLPYLQKESVFQSGAHAYRIPALLYLPGQQSLLAFAEQRASKKDEHAELIVLRRGDYDAPTHQVQWQAQEVVAQARLDGHRSMNPCPLYDAQTGTLFLFFIAIPGQVTEQQQLQTRANVTRLCQVTSTDHGRTWSSPRDLTDAAIGPAYREWSTFAVGPGHCLQLHDRARSLVVPAYAYRKLHPKQRPIPSAFCFLSHDHGRTWARGHFVAQDTLECQVAEVETGEQRVVTLNARSHLRARVQAQSTNDGLDFQESQLVKKLVEPPPAGCQGSVISFPSPRSGPGSPAQWLLYTHPTHRKQRADLGAYLNPRPPAPEAWSEPVLLAKGSAAYSDLQSMGTGPDGSPLFGCLYEANDYEEIVFLMFTLKQAFPAEYLPQ

SEQ ID NO: 52 - protein, 380 aa, Artificial Sequence
  Description of Artificial Sequence: Synthetic polypeptide
DASLPYLQKESVFQSGAHAYRIPALLYLPGQQSLLAFAEQRASKKDEHAELIVLRRGDYDASTHQVQWQAQEVVAQARLDGHRSMNPCPLYDAQTGTLFLFFIAIPGQVTEQQQLQTRANVTRLCQVTSTDHGRTWSSPRDLTDAAIGPAYREWSTFAVGPGHCLQLHDRARSLVVPAYAYRKLHPKQRPIPSAFCFLSHDHGRTWARGHFVAQDTLECQVAEVETGEQRVVTLNARSHLRARVQAQSTNDGLDFQESQLVKKLVEPPPAGCQGSVISFPSPRSGPGSPAQWLLYTHPTHRKQRADLGAYLNPRPPAPEAWSEPVLLAKGSAAYSDLQSMGTGPDGSPLFGCLYEANDYEEIVFLMFTLKQAFPAEYLPQ

SEQ ID NO: 53 - protein, 380 aa, Artificial Sequence
  Description of Artificial Sequence: Synthetic polypeptide
DASLPYLQKESVFQSGAHAYRIPALLYLPGQQSLLAFAEQRASKKDEHAELIVLRRGDYDATTHQVQWQAQEVVAQARLDGHRSMNPCPLYDAQTGTLFLFFIAIPGQVTEQQQLQTRANVTRLCQVTSTDHGRTWSSPRDLTDAAIGPAYREWSTFAVGPGHCLQLHDRARSLVVPAYAYRKLHPKQRPIPSAFCFLSHDHGRTWARGHFVAQDTLECQVAEVETGEQRVVTLNARSHLRARVQAQSTNDGLDFQESQLVKKLVEPPPAGCQGSVISFPSPRSGPGSPAQWLLYTHPTHRKQRADLGAYLNPRPPAPEAWSEPVLLAKGSAAYSDLQSMGTGPDGSPLFGCLYEANDYEEIVFLMFTLKQAFPAEYLPQ

SEQ ID NO: 54 - protein, 380 aa, Artificial Sequence
  Description of Artificial Sequence: Synthetic polypeptide
DASLPYLQKESVFQSGAHAYRIPALLYLPGQQSLLAFAEQRASKKDEHAELIVLRRGDYDANTHQVQWQAQEVVAQARLDGHRSMNPCPLYDAQTGTLFLFFIAIPGQVTEQQQLQTRANVTRLCQVTSTDHGRTWSSPRDLTDAAIGPAYREWSTFAVGPGHCLQLHDRARSLVVPAYAYRKLHPKQRPIPSAFCFLSHDHGRTWARGHFVAQDTLECQVAEVETGEQRVVTLNARSHLRARVQAQSTNDGLDFQESQLVKKLVEPPPAGCQGSVISFPSPRSGPGSPAQWLLYTHPTHRKQRADLGAYLNPRPPAPEAWSEPVLLAKGSAAYSDLQSMGTGPDGSPLFGCLYEANDYEEIVFLMFTLKQAFPAEYLPQ

SEQ ID NO: 55 - protein, 379 aa, Artificial Sequence
  Description of Artificial Sequence: Synthetic polypeptide
ASLPYLQKESVFQSGAHAYRIPALLYLPGQQSLLAFAEQRASKKDEHAELIVLRRGDYDAPTHQVQWQAQEVVAQARLDGHRSMNPCPLYDAQTGTLFLFFIAIPGQVTEQQQLQTRANVTRLCQVTSTDHGRTWSSPRDLTDAAIGPAYREWSTFAVGPGHCLQLHDRARSLVVPAYAYRKLHPKQRPIPSAFCFLSHDHGRTWARGHFVAQDTLECQVAEVETGEQRVVTLNARSHLRARVQAQSTNDGLDFQESQLVKKLVEPPPQGCQGSVISFPSPRSGPGSPAQWLLYTHPTHSWQRADLGAYLNPRPPAPEAWSEPVLLAKGSCAYSDLQSMGTGPDGSPLFGCLYEANDYEEIVFLMFTLKQAFPAEYLPQ

SEQ ID NO: 56 - protein, 380 aa, Artificial Sequence
  Description of Artificial Sequence: Synthetic polypeptide
MASLPYLQKESVFQSGAHAYRIPALLYLPGQQSLLAFAEQRASKKDEHAELIVLRRGDYDAPTHQVQWQAQEVVAQARLDGHRSMNPCPLYDAQTGTLFLFFIAIPGQVTEQQQLQTRANVTRLCQVTSTDHGRTWSSPRDLTDAAIGPAYREWSTFAVGPGHCLQLHDRARSLVVPAYAYRKLHPKQRPIPSAFCFLSHDHGRTWARGHFVAQDTLECQVAEVETGEQRVVTLNARSHLRARVQAQSTNDGLDFQESQLVKKLVEPPPQGCQGSVISFPSPRSGPGSPAQWLLYTHPTHSWQRADLGAYLNPRPPAPEAWSEPVLLAKGSCAYSDLQSMGTGPDGSPLFGCLYEANDYEEIVFLMFTLKQAFPAEYLPQ

SEQ ID NO: 57 - protein, 379 aa, Artificial Sequence
  Description of Artificial Sequence: Synthetic polypeptide
ASLPYLQKESVFQSGAHAYRIPALLYLPGQQSLLAFAEQRASKKDEHAELIVLRRGDYDAPTHQVQWQAQEVVAQARLDGHRSMNPCPLYDAQTGTLFLFFIAIPGQVTEQQQLQTRANVTRLCQVTSTDHGRTWSSPRDLTDAAIGPAYREWSTFAVGPGHCLQLHDRARSLVVPAYAYRKLHPKQRPIPSAFCFLSHDHGRTWARGHFVAQDTLECQVAEVETGEQRVVTLNARSHLRARVQAQSTNDGLDFQESQLVKKLVEPPPQGCQGSVISFPSPRSGPGSPAQWLLYTHPTHSWQRADLGAYLNPRPPAPEAWSEPVLLAKGSAAYSDLQSMGTGPDGSPLFGCLYEANDYEEIVFLMFTLKQAFPAEYLPQ

SEQ ID NO: 58 - protein, 380 aa, Artificial Sequence
  Description of Artificial Sequence: Synthetic polypeptide
DASLPYLQKESVFQSGAHAYRIPALLYLPGQQSLLAFAEQRASKKDEHAELIVLRRGDYDAPTHQVQWQAQEVVAQARLDGHRSMNPCPLYDAQTGTLFLFFIAIPGQVTEQQQLQTRANVTRLCQVTSTDHGRTWSSPRDLTDAAIGPAYREWSTFAVGPGHCLQLHDRARSLVVPAYAYRKLHPKQRPIPSAFCFLSHDHGRTWARGHFVAQDTLECQVAEVETGEQRVVTLNARSHLRARVQAQSTNDGLDFQESQLVKKLVEPPPQGCQGSVISFPSPRSGPGSPAQWLLYTHPTHSWQRADLGAYLNPRPPAPEAWSEPVLLAKGSAAYSDLQSMGTGPDGSPLFGCLYEANDYEEIVFLMFTLKQAFPAEYLPQ

SEQ ID NO: 59 - protein, 380 aa, Artificial Sequence
  Description of Artificial Sequence: Synthetic polypeptide
DASLPYLQKESVFQSGAHAYRIPALLYLPGQQSLLAFAEQRASKKDEHAELIVLRRGDYDAPTHQVQWQAQEVVAQARLDGHRSMNPCPLYDAQTGTLFLFFIAIPGQVTEQQQLQTRANVTRLCQVTSTDHGRTWSSPRDLTDAAIGPAYREWSTFAVGPGHCLQLHDRARSLVVPAYAYRKLHPKQRPIPSAFCFLSHDHGRTWARGHFVAQDTLECQVAEVETGEQRVVTLNARSHLRARVQAQSTNDGLDFQESQLVKKLVEPPPQGCQGSVISFPSPRSGPGSPAQWLLYTHPTHSWQRADLGAYLNPRPPAPEAWSEPVLLAKGSCAYSDLQSMGTGPDGSPLFGCLYEANDYEEIVFLMFTLKQAFPAEYLPQ

SEQ ID NO: 60 - protein, 380 aa, Artificial Sequence
  Description of Artificial Sequence: Synthetic polypeptide
AASLPYLQKESVFQSGAHAYRIPALLYLPGQQSLLAFAEQRASKKDEHAELIVLRRGDYDAPTHQVQWQAQEVVAQARLDGHRSMNPCPLYDAQTGTLFLFFIAIPGQVTEQQQLQTRANVTRLCQVTSTDHGRTWSSPRDLTDAAIGPAYREWSTFAVGPGHCLQLHDRARSLVVPAYAYRKLHPKQRPIPSAFCFLSHDHGRTWARGHFVAQDTLECQVAEVETGEQRVVTLNARSHLRARVQAQSTNDGLDFQESQLVKKLVEPPPQGCQGSVISFPSPRSGPGSPAQWLLYTHPTHSWQRADLGAYLNPRPPAPEAWSEPVLLAKGSAAYSDLQSMGTGPDGSPLFGCLYEANDYEEIVFLMFTLKQAFPAEYLPQ

SEQ ID NO: 61 - protein, 380 aa, Artificial Sequence
  Description of Artificial Sequence: Synthetic polypeptide
MASLPYLQKESVFQSGAHAYRIPALLYLPGQQSLLAFAEQRASKKDEHAELIVLRRGDYDAPTHQVQWQAQEVVAQARLDGHRSMNPCPLYDAQTGTLFLFFIAIPGQVTEQQQLQTRANVTRLCQVTSTDHGRTWSSPRDLTDAAIGPAYREWSTFAVGPGHCLQLHDRARSLVVPAYAYRKLHPKQRPIPSAFCFLSHDHGRTWARGHFVAQDTLECQVAEVETGEQRVVTLNARSHLRARVQAQSTNDGLDFQESQLVKKLVEPPPQGCQGSVISFPSPRSGPGSPAQWLLYTHPTHSWQRADLGAYLNPRPPAPEAWSEPVLLAKGSAAYSDLQSMGTGPDGSPLFGCLYEANDYEEIVFLMFTLKQAFPAEYLPQ

SEQ ID NO: 62 - protein, 380 aa, Artificial Sequence
  Description of Artificial Sequence: Synthetic polypeptide
AASLPYLQKESVFQSGAHAYRIPALLYLPGQQSLLAFAEQRASKKDEHAELIVLRRGDYDAPTHQVQWQAQEVVAQARLDGHRSMNPCPLYDAQTGTLFLFFIAIPGQVTEQQQLQTRANVTRLCQVTSTDHGRTWSSPRDLTDAAIGPAYREWSTFAVGPGHCLQLHDRARSLVVPAYAYRKLHPKQRPIPSAFCFLSHDHGRTWARGHFVAQDTLECQVAEVETGEQRVVTLNARSHLRARVQAQSTNDGLDFQESQLVKKLVEPPPQGCQGSVISFPSPRSGPGSPAQWLLYTHPTHSWQRADLGAYLNPRPPAPEAWSEPVLLAKGSCAYSDLQSMGTGPDGSPLFGCLYEANDYEEIVFLMFTLKQAFPAEYLPQ

SEQ ID NO: 63 - protein, 469 aa, Influenza A virus
MNPNQKIIALGSVSLTIAAICLLMQIAILATTMTLHLQQDGCTNPPNNQAVPHEPIIIERNRTEIVYVNNTTIEKENCPKVAEYKNWSKPQCQITGFAPFSKDNSIRLSAGGDIWVTREPYVSCGLGKCYQFALGQGTTLNNRHSNGTTHDRSPHRTLLMNELGVPFHLGTKQVCIAWSSSSCHDGKAWLHVCITGDDRNATASIIYDGLLTDSIGTWSKNILRTQESECICINGTCTVVMTDGSASGWADTRILFIREGKIVHISPLSGSAQHVEECSCYPRYPEVRCVCRDNWKGSNRPVLYINVEDYSIDSSYLCSGLVGDTPRNEDSSSSSNCRDPNNERGGPGVKGWAFDSGNDVWMGRTIRKDSREGYETFRVVGGWTTANSKSQINRQVIVDSDNLSGYSGMFSVEGKSCINRCFYVELIRGRPQETRVWWTSNSIIVFCGTSGTYGTGSWPDGANINFMSI

SEQ ID NO: 64 - protein, 466 aa, Influenza B virus
MLPSTIQTLTLFLTSGGVLLSLYVSASLSYLLYSGILLKFSPTEITAPTMPLNCANASNVQAVNRSATKGVTLLLPEPEWTYPRLSCPGSTFQKALLISPHRFGETKGNSAPLIIREPFIACGPKECKHFALTHYAAQPGGYYNGTREDRNKLRHLISVKLGKIPTVENSIFHMAAWSGSACHDGREWTYIGVDGPDSNALLKIKYGEAYTDTYHSYANNILRTQESACNCIGGDCYLMITDGSASGISECRFLKIREGRIIKEIFPTGRVEHTEECTCGFASNKTIECACRDNSYTAKRPFVKLNVETDTAEIRLMCTETYLDTPRPDDGSITGPCESHGDKGSGGIKGGFVHQRMASKIGRWYSRTMSKTKRMGMGLYVKYDGDPWIDSGALTLSGVMVSMEEPGWYSFGFEIKDKKCDVPCIGIEMVHDGGKKTWHSAATAIYCLMGSGQLLWDTVTGVDMAL

SEQ ID NO: 65 - protein, 572 aa, Human respirovirus 3
MEYWKHTNHGKDVGNELETSTATHGNKLTNKITYILWTITLVLLSIVFIIVLTNSIKSEKARESLLQDINNEFMEVTEKIQVASDNTNDLIQSGVNTRLLTIQSHVQNYIPISLTQQISDLRKFISEITIRNDNQEVPPQRITHDVGIKPLNPDDFWRCTSGLPSLMKTPKIRLMPGPGLLAMPTTVDGCVRTPSLVINDLIYAYTSNLITRGCQDIGKSYQVLQIGIITVNSDLVPDLNPRISHTFNINDNRKSCSLALLNTDVYQLCSTPKVDERSDYASSGIEDLVLDIVNYDGSISTTRFKNNNISFDQPYAALYPSVGPGIYYKGKIIFLGYGGLEHPINENAICNTTECPGKTQRDCNQASHSPWFSDRRMVNSIIVVDKGLNSVPKLKVWSISMRQNYWGSEGRLLLLGNKIYIYTRSTSWHSKLQLGIIDITDYSDIRIKWTWHNVLSRPGNNECPWGHSCPDGCITGVYTDAYPLNPTGSIVSSVILDSQKSRVNPVITYSTATERVNELAIRNETLSAGYTTTSCITHYNKGYCFHIVEINHKSLNTFQPMLFKTEIPKSCS

SEQ ID NO: 66 - protein, 572 aa, Bovine respirovirus 3
MEYWRHTNNAKNTNTEFQTETTRRNNKVTNVMMSIFGAILSTILLTVFIMILVGLIQEGNHNKIASQQMRREFAEIERKIQQATDEIGTSIQSGINTRLLTIQSHVQNYIPLSLTQQISDLRKFINELANKRDQQEVPIQRMTHDSGIEPLNPDKFWRCTSGNPSLASNPKIRLIPGPSLLAASTTVNGCIRIPSFVINNLIYAYTSNLIVQGCQDIGKSYQVLQIGIITINSDLVPDLNPRVTHTFNIDDNRKSCSLALLNTDVYQLCSTPKVDERSDYASTGIEDIVLDIITNNGLIITTRFTNDNITFDKPYAALYPSVGPGIYYKGKVIFLGYGGLEHAENGDVICNLTGCPGKTQRDCNQASYSPWFSNRRMVNSIIVVNKGVDTTFNLRVWTIPMRQNYWGSEGRLLLLGNKIYIYTRSTSWHSKLQLGTIDINNYSDIRINWTWHDALSRPGNDDCPWGHSCPDGCITGVYTDAYPLNPSGSVVSSVILDSRKSRENPIITYATDTRRVNELAIYNRTLPAAYTTTNCIMHYDKGYCFHIVEINHRSLNTFQPMLFKTEIPKNCS

SEQ ID NO: 67 - protein, 575 aa, Sendai virus
MDGDRGKRDSYWSTSPSGSTTKPASGWERSSKADTWLLILSFTQWALSIATVIICIIISARQGYSMKEYSMTVEALNMSSREVKESLTSLIRQEVIARAVNIQSSVQTGIPVLLNKNSRDVIQMIDKSCSRQELTQHCESTIAVHHADGIAPLEPHSFWRCPVGEPYLSSDPEISLLPGPSLLSGSTTISGCVRLPSLSIGEAIYAYSSNLITQGCADIGKSYQVLQLGYISLNSDMFPDLNPVVSHTYDINDNRKSCSVVATGTRGYQLCSMPTVDERTDYSSDGIEDLVLDVLDLKGRTKSHRYRNSEVDLDHPFSALYPSVGNGIATEGSLIFLGYGGLTTPLQGDTKCRTQGCQQVSQDTCNEALKITWLGGKQVVSVIIQVNDYLSERPKIRVTTIPITQNYLGAEGRLLKLGDRVYIYTRSSGWHSQLQIGVLDVSHPLTINWTPHEALSRPGNKECNWYNKCPKECISGVYTDAYPLSPDAANVATVTLYANTSRVNPTIMYSNTTNIINMLRIKDVQLEAAYTTTSCITHFGKGYCFHIIEINQKSLNTLQPMLFKTSIPKLCKAES

SEQ ID NO: 68 - protein, 901 aa, Actinomyces viscosus
MTSHSPFSRRRLPALLGSLPLAATGLIAAAPPAHAVPTSDGLADVTITQVNAPADGLYSVGDVMTFNITLTNTSGEAHSYAPASTNLSGNVSKCRWRNVPAGTTKTDCTGLATHTVTAEDLKAGGFTPQIAYEVKAVEYAGKALSTPETIKGATSPVKANSLRVESITPSSSQENYKLGDTVSYTVRVRSVSDKTINVAATESSFDDLGRQCHWGGLKPGKGAVYNCKPLTHTITQADVDAGRWTPSITLTATGTDGATLQTLTATGNPINVVGDHPQATPAPAPDASTELPASMSQAQHLAANTATDNYRIPAITTAPNGDLLISYDERPKDNGNGGSDAPNPNHIVQRRSTDGGKTWSAPTYIHQGTETGKKVGYSDPSYVVDHQTGTIFNFHVKSYDQGWGGSRGGTDPENRGIIQAEVSTSTDNGWTWTHRTITADITKDKPWTARFAASGQGIQIQHGPHAGRLVQQYTIRTAGGAVQAVSVYSDDHGKTWQAGTPIGTGMDENKVVELSDGSLMLNSRASDGSGFRKVAHSTDGGQTWSEPVSDKNLPDSVDNAQIIRAFPNAAPDDPRAKVLLLSHSPNPRPWSRDRGTISMSCDDGASWTTSKVFHEPFVGYTTIAVQSDGSIGLLSEDAHNGADYGGIWYRNFTMNWLGEQCGQKPAEPSPAPSPTAAPSAAPTEKPAPSAAPSAEPTQAPAPSSAPEPSAAPEPSSAPAPEPTTAPSTEPTPAPAPSSAPEQTDGPTAAPAPETSSAPAAEPTQAPTVAPSVEPTQAPGAQPSSAPKPGATGRAPSVVNPKATGAATEPGTPSSSASPAPSRNAAPTPKPGMEPDEIDRPSDGTMAQPTGGASAPSAAPTQAAKAGSRLSRTGTNALLILGLAGVAVVGGYLLLRARRSKN

SEQ ID NO: 69 - protein, 990 aa, Paenarthrobacter ureafaciens
MRSNSTSAPSLVRRAATGVLTCAVSIGLLAGLGLPAQAAPTPPNSPTLPPGSFSETNLAADRTAANFFYRIPALTYLGNDVVLAAWDGRPGSAADAPNPNSIVQRRSTDGGKTWGPVQVIAAGHVADASGPRYGYSDPSYIYDAEANKVFAFFVYSKDQGFGGSQFGNDDADRNVISSAVIESSDAGVTWSQPRLITSVTKPGTSKTNPAAGDVRSNFASSGEGIQLKYGPHKGRLIQQYAGDVRQADGSNKIQAYSVYSDDHGVTWHKGANVGDRMDENKTVELSDGRVLLNSRDNANRGYRKVAVSTDGGATYGPVSQDTELPDPANNGAIARMFPNAAQGSADAKKLIFTNANSKTGRENVSARVSCDDGETWPGVRTIRSGFSAYSTVTRLADGKFGVLYEGNYTDNMPFATFDDAWLNYVCAPLAVPAVNIAPSATQEVPVTVTNQEATTLSGATATVYTPSGWSATTVPVPDVAPGASVTVTVALTAPADASGPRSLNAAFTTADGRVSQFTFTATTPVAPQVGLTITGSAPARDVAANPYQAGDVLGYTLNVKSTANVAANSVPLTGTFDSGFLPPAAPNCRYNNLAAGASYNCTTAKHTITAADMERGYFVPEATFSITSTTTPSLTKTVQFTGAAVALRDGLISADISGARTDVGRDLATRPYAAGELVPYAFTVKNTSPFVEQVVPTAGNFSPFLPAGAGNCRYLSLPAGQSYECATPRHAVTAEEVEQGFFVPDTTWEVSAAGQSTRTYRINGGEVDLLVRDAALSATVVAEWKDADGDRFASAGDPVTFTYTVGNAGNVALTGLEAPDAGISLPFLAPGDTATATREHVLTAADVAGGSLAASAFEATARNGSKEVTATAEGQPLELKVQPAQPSKEPELTVQDLEDQTPPFDLGTAFKYRTGQKVSLAGLEYGQWYYVYLNKTGYRLGWMFPTTGDTVEFILPPEVRNGRDDVVVLDKDGRRVSFDRLQVTPKGEKI

SEQ ID NO: 70 - protein, 382 aa, Clostridium perfringens
MCNKNNTFEKNLDISHHPEPLILFNKDANIWNSKYFRIPNVQLLNDVTILTFSDIRYNAPDDHAYIDIASARSTDFGKTWSYNIAMKNNRIDSTYSRAMDSTTLITNTVRIILIASSWNTNGNWAMTTSARRSDWSVQMIYSDDNGLTWSNKIDLTKDSSKVKNQPSNTIGWLGGVGSGITMDDGTIVMPSQISARENNENNYYSLIIYSKDNGETWTMGNKVPNSNTSENMVIELDVALIMSTRYDYSGYRAAYISHDLGTTWEIYEPLNGKILTGKGSGCQGSFIHATTSNGKRIALISAPKNTHGEYIRDQIAVYMIDFDDLSKGVQEICIPYPEDGNKLGGGYSCLSFKNNHLGIVYDFNGNIEYQDLYPYYSLINKQ

SEQ ID NO: 71 - protein, 694 aa, Clostridium perfringens
MNYKGITLILTAAMVISGGNYVLVKGSTLDSGKNNSGYEIKVNNSENLSSLGEYKDINLESSNASNITYDLEKYKNLDEGTIVVRFNSKDSKIQSLLGISNSKTKNGYFNFYVTNSRVGFELRNQKNEGNTQNGTENLVHMYKDVALNDGDNTVALKIEKNKGYKLFLNGKMIKEVKDTNTKFLNNIENLDSAFIGKTNRYGQSNEYNFKGNIGFMNIYNEPLGDDYLLSKTGETKAKEEVLVEGAVKTEPVDLFHPGFLNSSNYRIPALFKTKEGTLIASIDARRQGGADAPNNDIDTAVRRSEDGGKTWDEGQIIMDYPDKSSVIDTTLIQDDETGRIFLLVTHFPSKYGFWNAGLGSGFKNIDGKEYLCLYDSSGKEFTVRENVVYDKDGNKTEYTTNALGDLFRNGTKIDNINSSTAPLKAKGTSYINLVYSDDDGKTWSEPQNINFQVKKDWMKFLGIAPGRGIQIKNGEHKGRIVVPVYYTNEKGKQSSAVIYSDDSGKNWTIGESPNDNRKLENGKIINSKTLSDDAPQLTECQVVEMPNGQLKLFMRNLSGYLNIATSFDGGATWDETVEKDTNVLEPYCQLSVINYSQKIDGKDAVIFSNPNARSRSNGTVRIGLINQVGTYENGEPKYEFDWKYNKLVKPGYYAYSCLTELSNGNIGLLYEGTPSEEMSYIEMNLKYLESGANK

SEQ ID NO: 72 - protein, 1173 aa, Clostridium perfringens
MKSKKIIATLVASLVISNMGGYLVKANPNVNHKAVIIEDRQAIIETAIPQSEMTASATSEEGQDPASSAIDGNTNTMWHTKWNGSDALPQSLSVNLGSSRKVSSIAITPRTSGNNGFITKYEIHAINNGVEALVAEGTWEENNLVKTVTFDSPIDAEEIKITAIQGVGGFASIAELNVYEIKGEVDEIANYGNLKITKEEERVNITGDLEKFSSLEEGTIVTRFNMNDTSIQSLIGLSDGNKANNYFSLYVSGGKVGYELRRQEGNGDFNVHHSADVTFNRGINTLALKIEKGIGAKIFLNGSLVKTVSDPNIKFLNAINLNSGFIGKTDRANGYNEYLFRGNIDFMNIYDKPVSDNYLLRKTGETKAPLEDSLLPDDVYKTQPVELFYPGYLESRGYRIPALETTKKGTVLASIDVRNNGDHDAPNNNIDVGIRRKEVNGEWEEGKVILDYPGKSAAIDTSLMSATIEENGIEKERIFLIVTHFPEGYGFPNTEGGSGYREIDGKYYFILKDAQNNEYTVREDGIVYNSEGNQTDYVMKNDKTLIQNGEEVGNALLSNSPLKAVGTAHIEMIYSDDDGKTWSEPEDLNPGLKKEWMKFFGTAPGKGIQIKNGEHKDRLIFPIYYTNQNNFQSSAVIYSDDFGETWKLGESPIDTASVSSETVSSGTQLTECQVVEMPNGQLKLFMRNTGSYTRIATSFDGGATWHDEVPEDTSLREPYCQLSVINYSGKINGKDAIIFSNPDASSRVNGSVKVGLINENGTYDNGEPRYEFDWIYNKTVKPGSFAYSCLTELPDGNLGLFYEGEGAGRMAYTEFDLNYLKFNASEDSPSASVQSIEVLDEDLAYNSGEEVSIKVNFNQLVSIIGDRKITLDIGGVDVPLNMVNYEGKSSAIFKGTIPEGINQGNYEIKLKENNTLELNTVYNKVSTFNGLDNTGINVQIGELKTTVGNSTIKVNDEVQVGSAFEAILGIEGLNGDTEVYSAEYLFEYNAEAFILNEITSFNDSLFVKSKEVEPGKVRILVASLGNEIEKDSDLVKVNLTPKISSELEVLGLTTALVGAGDGNTHDLELSSKEVKINEEASGEIVVNPVQNFEIPEINKKNVKLTWNAPITTEGLEGYVIYKDGKKLSEVPAESTEFVVSKLNRHTIYNFKVAAKYSNGELSAKESKTIRTAR

SEQ ID NO: 73 - protein, 773 aa, Clostridium tertium
MYSLIKKSISTIALSTLAITSLPTYSVSSQTTEEYGARKYFINNNIENIKNIENKSFDLIQNLNTKILEKENIETLSGTVVDFTKEATSNSTIPNGLIIEKSNINITAGKGYDLSSEMGSEYVKALEKGTIIVSYKSTSNNSIQSLVSIGNNTSGNRDRHFHIYITNTGEVGMELRNTDSVLKYTLGRPAAVRSIYKNNLVFNTIAFKADPSNKQYKLFANGELLATLNTDVYKFINDITGVNNVMLGGTVRDGVIAYPFGGTIGNVKIYNEILTDEALKAETGATTYGKNIFYAGDSTKSNYFRIPSLLSLRSGTVVSAADARYGGTHDSKSNIDIAFSKSLDGGIIWKNPTIPLQFNDYVARNIDWPRDSIGKNVQIQGSASFIDPVLLEDKETKRLFIFADAMPAGIGSSNASTGSGYKDIAGKKYMKLRWHQDGSSTYNYSIRENGVIYNDVTNLPTEYKIDGDYNLYKNGIALLYKQYDYNFSGTTLLETATNIDVNMNVFYKDSLFKVFPTTYLDMKYSDDEGETWSNLNIVSSFKPENSKFLVLGPGVGKQISKGQYKGRLIVPLYSSSYAELGFMYSDDHGQTWNYVAADNRNTGTTAEAQIVEMPDGSLKSYLRTGSGVIAEVTSINGGETWSDRVTVPNMHTTSYGTQLSVINYAGLIDGKEAIILSAPDSSSARRNGKIWIGLISDTGASGINKYSIEWKYCYSVDSSNMGYSYSCLTELPNGDIGLLYEKYDSWSRNELHLKNILKYETFSINELKQPISN

SEQ ID NO: 74 - protein, 731 aa, Corynebacterium diphtheriae
MYSSNRTYSRAILGLSAVLTLSFTSLVAPVNAEEPETVVPATAELEGEVAATLPSAETGLLDAAPPKPVARGAAGDLQLPAVNEKEVFEEGRVIRAPEPDQSRCYRIPALVTAKNGDLLLAFDNRYGGGDGAKTWCRDAPYENMKRINRQNMQTDIQLYRSVDNGQSFEDFGYIAQGTADVRELSYTDPALVTDRTTGKIFAFFVRAYDYRVGQSSAGFNEGDVEAEIQKRDVQDTVVVESLDGGQTWGNMRLLSALTAKVSSISTGDTIFDGRGRFVTSGAGIQLQYGEHAGRLIVPISVDIDPKDSAKFINLAIYSDDHGQTWQAGIGTAGGAGFSGDVSKIVELSDGRLMMSSKDNDKPRWVSYSEDQGENWSTPKRKIIAPPQHPEKHNTGINVGLIRAYPNAPENSAAARVLLYSAPIDQRYSHKHTEDGRNNGWVMGSCDDGKTWSFGRQIEKNRFQYSSMTVMSDGNIGMVYESGDFSTGMNLKFAKFNMAWLGADCHSNEALGLTGDIDKEIVEAQEKAAEATKEAQEAAEKVQKLTEELAAARKENDELKNQVKGFKEAVGDLANEAEDLADKVFKLETAVTEAKEKATVAEKAASDAVTQLQKAESIAEEQKAKAESAAAEAQALREKLERLEGSILTVKENPEAEEIADLSSTAKDAADAARRAATDANGALSGQKQDEEKPAMGLMGILKVLAGIIPLVAIIATIFQTFRLPFNIPGMR

SEQ ID NO: 75 - protein, 647 aa, Micromonospora viridifaciens
MTANPYLRRLPRRRAVSFLLAPALAAATVAGASPAQAIAGAPVPPGGEPLYTEQDLAVNGREGFPNYRIPALTVTPDGDLLASYDGRPTGIDAPGPNSILQRRSTDGGRTWGEQQVVSAGQTTAPIKGFSDPSYLVDRETGTIFNFHVYSQRQGFAGSRPGTDPADPNVLHANVATSTDGGLTWSHRTITADITPDPGWRSRFAASGEGIQLRYGPHAGRLIQQYTIINAAGAFQAVSVYSDDHGRTWRAGEAVGVGMDENKTVELSDGRVLLNSRDSARSGYRKVAVSTDGGHSYGPVTIDRDLPDPTNNASIIRAFPDAPAGSARAKVLLFSNAASQTSRSQGTIRMSCDDGQTWPVSKVFQPGSMSYSTLTALPDGTYGLLYEPGTGIRYANFNLAWLGGICAPFTIPDVALEPGQQVTVPVAVTNQSGIAVPKPSLQLDASPDWQVQGSVEPLMPGRQAKGQVTITVPAGTTPGRYRVGATLRTSAGNASTTFTVTVGLLDQARMSIADVDSEETAREDGRASNVIDGNPSTFWHTEWSRADAPGYPHRISLDLGGTHTISGLQYTRRQNSANEQVADYEIYTSLNGTTWDGPVASGRFTTSLAPQRAVFPARDARYIRLVALSEQTGHKYAAVAELEVEGQR

SEQ ID NO: 76 - protein, 747 aa, Pasteurella multocida
MKKPVFLLSLLALSTSMAVHGNSFWKADLHENLTNVTKRVGVDGFTVNKEGQPWPGIGPNGEAGGTVTLPYSRIPAMTITDDNKMVVMFDLRWKTASDQNRIDPGAAISEDGGHSWKRITAWNFNDSKISLRRAMDPTLLFNSFDGSLYVMHGTWAAGTQNWYRDRLSYFNQNIWAATIYKSTDGGLSWQKNTEFSNTVNRDVFMKVQKGVGNPTIGFLGGVGTGIVMKDGTLVFPIQTAHREGIATTIMYSKDNGRTWDMPTINNALAPNPSSLENMVFEIDNKLVMTGREDNGKKTRWAYYTEDLGQTWHVYEPVNGFSATTAAPSQGSSIYVTLPIGKRFLLLSKPNGNGNDRYAKGNLALWMLNAKNPNHKHQVPIIKPGSGNSAGAGYSPLAYKKGNLFIAFENNGDITVKNLSAHMQAIEKKATEWGLTDEIATEVEKINSLEHLNKGQKETLSAKMRRANDNAVAESNVLNREMHELKDEATSLEQKSVAMRKALPSKMKQFKRDLGEVRDLTQLTNETYLNYLGIQGLMAMLNGSFLALNTPLDFSKYIKQGEKLNSYDTDILYSTYNKVFVEYDSVIKNSQHRPTIALGLNTRLTDQTQAGVFYEYENKKQKVDAFGVRAQYTKGDNVLAPFLRYRTVKHDDVIDRNHNVDLYINYAKNVNIDPHLTLSPFVGAYTSLSSRTLLDEDVAVNKRLVMAGDVGLDIRYRLADISVSIRPNIAFIKDGFTFSQAIYRDNPF

SEQ ID NO: 77 - protein, 1070 aa, Pasteurella multocida
MMKKFNPSVLALSISSLLLTSTLTFGQIQQQDKAHFGVKEHQESLLFHQSLVKQGSDNVPIWRIPSLLRTKDGVLIAAADKRWQHRGDWGDIDTAIRISHDDGKTWGNITTILDLPSQNGEKSPIRDDAPTFNPWAHRNNSSVATYRNSAFLIDAQMVQDKRNGRIFLAVDMFPESTGLSGPSDNGVTEFGSGYVNIDGKQYLRLNKKEGYTSKQWTLRENGIVFNEKNEKTGYRVVINGDPKKNFKDLGDVYDQDNNKLGNIYLKQTERNATVPFIAPNTSYFWLTHSDDNGKTWSSPIDLTSQVKKDWMRFFGTGPGVGIQTKKGNLLFPIYYINRHGKQSSALIISKDGGKTWDLGQSPNDTRTELYGKNSETLNSNSSGHELTESQLVELQNGDLKLFMRNTSGRVMMSTSKDGGYSWIETKQVPELNHGYSQLSVIKYSKKINGKEYIVFSGQSVSGNSGDKLRRDGKLFLGEVQDNGDINWDTTNLVRNIKSSGLAKQGSEVYPNGYVYSSMAELGDGSIGLAYENTTDYTTIMYLPIEMQEFFWKAGKIFSDVRQKEPLVFTYDGTETLEKIGDGIAIKRGEGESQSGINVSEGLLVLDQQTKDGKNKAFTQLTLNNSGVAQVNSTQNIDRFVVNNGATGYLQFTVTDTHSPRLKINQDVTAHGQIVAVQVNLQKKLKPNDKGYYHAQGEELIAFKDNGQVKWRLVNDELKDGMYVYTLASVAKPSGLRTPSQPHSLYLTNKLITADGKAVSTVAPLKAPLTVNARPQVNPVLASYLTANLALNKMSEQLQQSFMHETRLLQEKDRSIFVKYLNGKQKYGSNLSFYDYGYDFNASYSGVMLGGKVWQSERGNHALYTALNKTSYKVTPKAVDGETKAKYQSWGGSINWHSNLPHNLIVDLSTGYQKHKGDIEHAGHVKGYTFNIGADLGYRYQWMKNAFITPMVGLHYLYASLSDVNDQANKALLKYNNFNALKTNLGVDVNYRIGKFEVKGLLSYDMYQQKTRQLYVDDVAYKQGKLADTLHLNTQFVAHLTPRFAFSTEVGFQHARNKGQSSFAVGAHYQF

SEQ ID NO: 78 - protein, 438 aa, Pseudomonas aeruginosa
MNTYFDIPHRLVGKALYESYYDHFGQMDILSDGSLYLIYRRATEHVGGSDGRVVFSKLEGGIWSAPTIVAQAGGQDFRDVAGGTMPSGRIVAASTVYETGEVKVYVSDDSGVTWVHKFTLARGGADYNFAHGKSFQVGARYVIPLYAATGVNYELKWLESSDGGETWGEGSTIYSGNTPYNETSYLPVGDGVILAVARVGSGAGGALRQFISLDDGGTWTDQGNVTAQNGDSTDILVAPSLSYIYSEGGTPHVVLLYTNRTTHFCYYRTILLAKAVAGSSGWTERVPVYSAPAASGYTSQVVLGGRRILGNLFRETSSTTSGAYQFEVYLGGVPDFESDWFSVSSNSLYTLSHGLQRSPRRVVVEFARSSSPSTWNIVMPSYFNDGGHKGSGAQVEVGSLNIRLGTGAAVWGTGYFGGIDNSATTRFATGYYRVRAWI

SEQ ID NO: 79 - protein, 412 aa, Salmonella phage Fels-1
MTRHLLNCRILYMHPPLDMHTHPFIKEGKSMTVEKSVVFKAEGEHFTDQKGNTIVGSGSGGTTKYFRIPAMCTTSKGTIVVFADARHNTASDQSFIDTAAARSTDGGKTWNKKIAIYNDRVNSKLSRVMDPTCIVANIQGRETILVMVGKWNNNDKTWGAYRDKAPDTDWDLVLYKSTDDGVTFSKVETNIHDIVTKNGTISAMLGGVGSGLQLNDGKLVFPVQMVRTKNITTVLNTSFIYSTDGITWSLPSGYCEGFGSENNIIEFNASLVNNIRNSGLRRSFETKDFGKTWTEFPPMDKKVDNRNHGVQGSTITIPSGNKLVAAHSSAQNKNNDYTRSDISLYAHNLYSGEVKLIDDFYPKVGNASGAGYSCLSYRKNVDKETLYVVYEANGSIEFQDLSRHLPVIKSYN

SEQ ID NO: 80 - protein, 697 aa, Streptococcus pneumoniae
MNKRGLYSKLGISVVGISLLMGVPTLIHANELNYGQLSISPIFQGGSYQLNNKSIDISSLLLDKLSGESQTVVMKFKADKPNSLQALFGLSNSKAGFKNNYFSIFMRDSGEIGVEIRDAQEGINYLFSRPASLWGKHKGQAVENTLVFVSDSKDKTYTMYVNGIEVFSETVDTFLPISNINGIDKATLGAVNREGKEHYLAKGSIGEISLFNKAISDQEVSNIPLSNPFQLIFQSGDSTQANYFRIPTLYTLSSGRVLSSIDARYGGTHDSKSKINIATSYSDDNGKTWSEPIFAMKFNDYEEQLVYWPRDNKLKNSQISGSASFIDSSIVEDKKSGKTILLADVMPAGIGNNNANKADSGFKEINGHYYLKLKKNGDNDFRYTVRENGVVYDETTNKPTNYTINDKYEVLEGGKSLTVEQYSVDFDSGSLRERHNGKQVPMNVFYKDSLFKVTPTNYIAMTTSQNRGESWEQFKLLPPFLGEKHNGTYLCPGQGLALKSSNRLIFATYTSGELTYLISDDSGQTWKKSSASIPFKNATAEAQMVELRDGVIRTFFRTTTGKIAYMTSRDSGETWSKVSYIDGIQQTSYGTQVSAIKYSQLIDGKEAVILSTPNSRSGRKGGQLVVGLVNKEDDSIDWRYHYDIDLPSYGYAYSAITELPNHHIGVLFEKYDSWSRNELHLSNVVQYIDLEINDLTK

SEQ ID NO: 81 - protein, 539 aa, Tannerella forsythia
MKKFFWIIGLFISMQMTRAADSVYVQNPQIPILIDRTDNVLFRIRIPDATKGDVLNRLTIRFGNEDKLSEVKAVRLFYAGTEAATKGRSRFAPVTYVSSHNIRNTRSANPSYSVRQDEVTTAANTLTLKTRQPMVKGINYFWVSVEMDRNTSLLSKLTPTVTEAVINDKPAVIAGEQAAVRRMGIGVRHAGDDGSASFRIPGLVTTNEGTLLGVYDVRYNNSVDLQEHVDVGLSRSTDKGQTWEPMRIAMSFGETDGLPSGQNGVGDPSILVDERTNTVWVVAAWTHGMGNARAWTNSMPGMTPDETAQLMMVKSTDDGRTWSEPINITSQVKNPSWCFLLQGPGRGITMRDGTLVFPIQFIDSLRVPHAGIMYSKDRGETWHIHQPARTNTTEAQVAEVEPGVLMLNMRDNRGGSRAVSITRDLGKSWTEHSSNRSALPESICMASLISVKAKDNIIGKDLLLFSNPNTTEGRHHITIKASLDGGVTWLPAHQVLLDEEDGWGYSCLSMIDRETVGIFYESSVAHMTFQAVKIKDLIR

SEQ ID NO: 82 - protein, 807 aa, Vibrio cholerae
MSIKMTSQRRRASIHKETDSNIKGVDMRFKNVKKTALMLAMFGMATSSNAALFDYNATGDTEFDSPAKQGWMQDNTNNGSGVLTNADGMPAWLVQGIGGRAQWTYSLSTNQHAQASSFGWRMTTEMKVLSGGMITNYYANGTQRVLPIISLDSSGNLVVEFEGQTGRTVLATGTAATEYHKFELVFLPGSNPSASFYFDGKLIRDNIQPTASKQNMIVWGNGSSNTDGVAAYRDIKFEIQGDVIFRGPDRIPSIVASSVTPGVVTAFAEKRVGGGDPGALSNTNDIITRTSRDGGITWDTELNLTEQINVSDEFDFSDPRPIYDPSSNTVLVSYARWPTDAAQNGDRIKPWMPNGIFYSVYDVASGNWQAPIDVTDQVKERSFQIAGWGGSELYRRNTSLNSQQDWQSNAKIRIVDGAANQIQVADGSRKYVVTLSIDESGGLVANLNGVSAPIILQSEHAKVHSFHDYELQYSALNHTTTLFVDGQQITTWAGEVSQENNIQFGNADAQIDGRLHVQKIVLTQQGHNLVEFDAFYLAQQTPEVEKDLEKLGWTKIKTGNTMSLYGNASVNPGPGHGITLTRQQNISGSQNGRLIYPAIVLDRFFLNVMSIYSDDGGSNWQTGSTLPIPFRWKSSSILETLEPSEADMVELQNGDLLLTARLDFNQIVNGVNYSPRQQFLSKDGGITWSLLEANNANVFSNISTGTVDASITRFEQSDGSHFLLFTNPQGNPAGTNGRQNLGLWFSFDEGVTWKGPIQLVNGASAYSDIYQLDSENAIVIVETDNSNMRILRMPITLLKQKLTLSQN

SEQ ID NO: 83 - protein, 731 aa, Corynebacterium diphtheriae; identical to SEQ ID NO: 74

SEQ ID NO: 84 - protein, 909 aa, Corynebacterium glutamicum
MSRRKAVFSALGAAALIGAALPTIPTAQAQTPTGYGFDATASIGEEPEFSTQQLADGGTLGFDCYRIPSLGVAPNGNVLASWDGRPNNCSDAPQPNSIVGKVSTDNGATWGEQHDISAGITAEPKTGYSDPSIVVDWERGDVFNFHVKSFDAGYFTSQPGTDPDDRNVAHVAYAKSSDNGSTWVADTVITDQVVADDTWDSRFATSGNGIQLQYGAYKGRLVQPSVTRMTNGRVAAVAMLSDDHGTTWYPSAPWGNSMDENKIVELSDGTLMNNSRSSGADTYRKVSYSTDGGVTWTEPTLDTQLPDPRNNASLIRVFPTAPEGSAQAKVLLFSNTATTSGRTNGTVRMSCDDGQTWPVSKVFEPGAIQYTSMATLPNGDIGMLWENSGSNIDIFYSQFNLSWLEAGCIGVDADETPVTAGETTTMNVTLTNPFANAIFDRAVSLELPEGWQAEDVRVSIPSGESVTIPVQVTAPLVADNGELPVEVSILDGADRYTGRLNLTVQGGQEPASTSVKVSIPNLKDTYVAGEKISINFAVNNPFDVTVNSVPSLGEGENWMPANLRGFDPEQGAPNCRYRNLGANQSYNCTTTTYEVSDSDVERGYVDIPTVWTFTNSAGETVWSKNVDVPRIELNGTQDAVTDAIVTVDPINPVHSNGQSQTVEVQANVTSEGDLPAGSKVAFYLDSSPIDAAAVDAEGHASISIDVDNIASEQPERTFEVRARLVVPEDAPRSIARDALARFTVLPEQVQQNSLVIMNHPDVVSDGQTKTIVIAVKATAHDGSPVAIGTLITFRVNGIERDVVPTNAQGTAKLQLDLKPVNTEDEEYEVTVEAELDELTAQTTFKVLAGEEEEPTSTEEQPSETEQPSEPEEEPTAPTGSSNGGSFAALLALLAALGGIVGAVLGLLKL

SEQ ID NO: 85 - protein, 694 aa, Clostridium perfringens
MNYKGITLILTAAMVISGGNYVLVKGSTLDSGKNNSGYEIKVNNSESLSSLGEYKDINLESSNASNITYDLEKYKNLDEGTIVVRFNSKDSKIQSLLGISNSKTKNGYFNFYVTNSRVGFELRNQKNEGNTQSGTENLVHMYKDVALNDGDNTVALKIEKNKGYKLFLNGKIIKEVKDTNTKFLNNIENLDSAFIGKTNRYGQSNEYNFKGNIGFMNIYNEPLGDDYLLSKTGETKAKEEVLVEGAVKTEPVDLFHPGFLNSSNYRIPALFKTKEGTLIASIDARRHGGADAPNNDIDTAVRRSEDGGKTWDEGQIIMDYPDKSSVIDTTLIQDDETGRIFLLVTHFPSKYGFWNAGLGSGFKNIDGKEYLCLYDSSGKEFTVRENVVYDKDGNKTEYTTNALGDLFKNGTKIDNINSSTAPLKAKGTSYINLVYSDDDGKTWSEPQNINFQVKKDWMKFLGIAPGRGIQIKNGEHKGRIVVPVYYTNEKGKQSSAVIYSDDSGKNWTIGESPNDNRKLENGKIINSKTLSDDAPQLTECQVVEMPNGQLKLFMRNLSGYLNIATSFDGGDTWDETVEKDTNVLEPYCQLSVINYSQKVDGKDAVIFSNPNSRSRSNGTVRIGLINQVGTYENGEPKYEFDWKYNKLVKPGYYAYSCLTELSNGNIGLLYEGTPSEEMSYTEMNLKYLESGANK

SEQ ID NO: 86 - protein, 544 aa, Bacteroides fragilis
MKKAVILFSLFCFLCAIPVVQAADTIFVRETRIPILIERQDNVLFYLRLDAKESQTLNDVVLNLGEGVNLSEIQSIKLYYGGTEALQDSGKKRFAPVGYISSNTPGKTLAANPSYSIKKSEVTNPGNQVVLKGDQKLFPGINYFWISLQMKPGTSLTSKVTADIASITLDGKKALLDVVSENGIEHRMGVGVRHAGADNSAAFRIPGLVTTNKGTLLGVYDVRYNSSVDLQEHVDVGLSRSTDGGKTWEKMRLPLAFGEFGGLPAGQNGVGDPSILVDTKTNNVWVVAAWTHGMGNQRAWWSSHPGMDMNHTAQLVLAKSTDDGKTWSAPINITEQVKDPSWYFLLQGPGRGITMSDGTLVFPTQFIDSTRVPNAGIMYSKDGGKNWKMHNYARTNTTEAQVAEVEPGVLMLNMRDNRGGSRAVAITKDLGKTWTEHESSRKALPESVCMASLISVKAKDNVLGKDLLIFSNPNTTKGRYNTTIKISLDGGVTWSPEHQLLLDEGNNWGYSCLSMIDKETIGILYESSVAHMTFQAVKLKDIIK

SEQ ID NO: 87 - protein, 601 aa, Micromonospora viridifaciens
GEPLYTEQDLAVNGREGFPNYRIPALTVTPDGDLLASYDGRPTGIDAPGPNSILQRRSTDGGRTWGEQQVVSAGQTTAPIKGFSDPSYLVDRETGTIFNFHVYSQRQGFAGSRPGTDPADPNVLHANVATSTDGGLTWSHRTITADITPDPGWRSRFAASGEGIQLRYGPHAGRLIQQYTIINAAGAFQAVSVYSDDHGRTWRAGEAVGVGMDANKTVELSDGRVLLNSRDSARSGYRKVAVSTDGGHSYGPVTIDRDLPDPTNNASIIRAFPDAPAGSARAKVLLFSNAASQTSRSQGTIRMSCDDGQTWPVSKVFQPGSMSYSTLTALPDGTYGLLYEPGTGIRYANFNLAWLGGICAPFTIPDVALEPGQQVTVPVAVTNQSGIAVPKPSLQLDASPDWQVQGSVEPLMPGRQAKGQVTITVPAGTTPGRYRVGATLRTSAGNASTTFTVTVGLLDQARMSIADVDSEETAREDGRASNVIDGNPSTFWHTEWSRADAPGYPHRISLDLGGTHTISGLQYTRRQNSANEQVADYEIYTSLNGTTWDGPVASGRFTTSLAPQRAVFPARDARYIRLVALSEQTGHKYAAVAELEVEGQR

SEQ ID NO: 88 - protein, 1035 aa, Streptococcus pneumoniae
MSYFRNRDIDIERNSMNRSVQERKCRYSIRKLSVGAVSMIVGAVVFGTSPVLAQEGASEQPLANETQLSGESSTLTDTEKSQPSSETELSGNKQEQERKDKQEEKIPRDYYARDLENVETVIEKEDVETNASNGQRVDLSSELDKLKKLENATVHMEFKPDAKAPAFYNLFSVSSATKKDEYFTMAVYNNTATLEGRGSDGKQFYNNYNDAPLKVKPGQWNSVTFTVEKPTAELPKGRVRLYVNGVLSRTSLRSGNFIKDMPDVTHVQIGATKRANNTVWGSNLQIRNLTVYNRALTPEEVQKRSQLFKRSDLEKKLPEGAALTEKTDIFESGRNGKPNKDGIKSYRIPALLKTDKGTLIAGADERRLHSSDWGDIGMVIRRSEDNGKTWGDRVTITNLRDNPKASDPSIGSPVNIDMVLVQDPETKRIFSIYDMFPEGKGIFGMSSQKEEAYKKIDGKTYQILYREGEKGAYTIRENGTVYTPDGKATDYRVVVDPVKPAYSDKGDLYKGNQLLGNIYFTTNKTSPFRIAKDSYLWMSYSDDDGKTWSAPQDITPMVKADWMKFLGVGPGTGIVLRNGPHKGRILIPVYTTNNVSHLNGSQSSRIIYSDDHGKTWHAGEAVNDNRQVDGQKIHSSTMNNRRAQNTESTVVQLNNGDVKLFMRGLTGDLQVATSKDGGVTWEKDIKRYPQVKDVYVQMSAIHTMHEGKEYIILSNAGGPKRENGMVHLARVEENGELTWLKHNPIQKGEFAYNSLQELGNGEYGILYEHTEKGQNAYTLSFRKFNWDFLSKDLISPTEAKVKRTREMGKGVIGLEFDSEVLVNKAPTLQLANGKTARFMTQYDTKTLLFTVDSEDMGQKVTGLAEGAIESMHNLPVSVAGTKLSNGMNGSEAAVHEVPEYTGPLGTSGEEPAPTVEKPEYTGPLGTSGEEPAPTVEKPEYTGPLGTAGEEAAPTVEKPEFTGGVNGTEPAVHEIAEYKGSDSLVTLTTKEDYTYKAPLAQQALPETGNKESDLLASLGLTAFFLGLFTLGKKREQ

SEQ ID NO: 89 - protein, 648 aa, Streptomyces coelicolor
MPPRTRRPFWLALATSCALAVSSPFPAHARPGDRAPAFGEQVLFDAARDPGGYACFRIPAIVRTTDGTLLAFAEGRVLDCADDGDIDIVLRRSLDGGRTWGPLRVVNDGGGDTHGNPAPVVDRATGRVLLLETYNAGRTDSADCAVPCARVPHVQHSDDGGRTWSAPRDLSPEILPPDWNSWYATGPVHGVQLTGGAHPGRLVVGVNAETWDGERSEMGVPPAGGWGRVTANHAALVVSDDGGEHWRTGATDTWPVAADGTFRQKPSELTLTERADGALLVSGREENGTDPGHRTQALSRDGGDSFAAPFRALPDLYAPQVQGAVLRLGNRILLSAPADPDRRRTMTVRSSRDGGATWDSADRGTVVTRDWAGYSDLVTVDDDTVGLLYEGGKTDARDEIRFARLTADRLAPPRGPDPTTPDLAANAAPAAVLGGAAPTTDGAVGGALAFDGADDAVRLPYDGRLALGEGDFTASLWFRYSAADGEQPLLWMGGIGTTQPQVWLRAEPDAGRVQGLITARDGATAPRSAWVRTDRAYDDGRWHRLTLRRGGGRLTLFVDGSAAADAADVPGSVSRNSPFGVHIGERMDGRARFTGAVDDVQVWNSALTDTEIAAGVPPAAGRSTVLHLPLDRVDEAAADTGGSTDTGG

SEQ ID NO: 90 - protein, 479 aa, Streptomyces griseus
MQRRVTVAMLSAALLVATTAGTAHGAPAAAPGELTSQDIATQGVGSPHYRIPALTTSVRGTLIAAYDTRPTLGDLPGNLGVVVRRSTDGGATWESQQVVRKEAAPKGFGDPSLLVDRTTGRIFVFYAGSVNQGFFGSGTGNDESDPNILQADYSYSDDDGVTWTHRRITKQIKNPAWAGMFAASGEGIQVRHGAYEGRLIQQYAIRNNGANYAVSAYSDDHGATWKTGTPVGPGGDENKTVELSDGRIMLNNRSAPYRTVAYSSDGGVTYTPFVQDTDLPDPANNGSVIRYAPDVPASHPQASWLLFSNTDSTARKNLTVKMSCDNGRTWPIRKVVDPGSAAYSTLTRLPDGRLGLLYERADYRHITYSSFDLKWLGGTCADITITPPATLRAGTTAEVTVRVVNRMDVTRSAGTLDLAVPAGWSTRQVAFPAVRPGQGANIKVPVTIPAGATGDARLTVTYKADGKQASGSRSVTVTP

SEQ ID NO: 91 - protein, 502 aa, Propionibacterium acnes
MTLTTKLSALTTAGIMVVIGVPMVTQSAMASGRAPAPVAATTQPKLVTGDITSTDQSGTNLFFGKKIVRNARGAIMKVDRTWPAAVPAPLPDVRADSSTRMLLGPVVDLAVNEHPEGVFYRIPALATASNGDLLASYDLRPGSAGDAPNPNSIVQRRSRDNGRTWGPQTVIHAGTPGRRKVGYSDPSYLVDPATGRILNFHVKSYDRGFATSEVGTDPDDRHVLHAEVSTSTDNGHTWTHRDITREITPDPTTRTRFVASGQGIALLHGPHAGRLIAQMTVRNSVGQQAQSIYSDDHGITWHAGNPVGRMMDENKVVELSDGTLMLNSRDAARSGRRKVAYSQDGGLTWGPVKLVDDLIDPTNNAQIIRAYPNARAGSAKARILLFTNARNATERVNGTLSVSCDDGRTWVSHQTYMPGEVGYTTAAVQSDGALGVLWERDGIRYSTIPMGWLNSVCPLAPSGRPTSGKPTSGTSLPPTATPSGSLHGGASSRPTSLPHTGD

SEQ ID NO: 92 - protein, 762 aa, Macrobdella decora
MGRIGKKAMAIALVSAVMVTPLNVCATVENQEQQQVTQGAEDIAVIDDAQETVAADEAQADEAAAITVEGRETAEESSASIPEGILMEKNNVDIAEGQGYSLDQEAGAKYVKAMTQGTIILSYKSTSENGIQSLFSVGNSTAGNQDRHFHIYITNSGGIGIELRNTDGVFNYTLDRPASVRALYKGERVFNTVALKADAANKQCRLFANGELLATLDKDAFKFISDITGVDNVTLGGTKRQGKIAYPFGGTIGDIKVYSNALSDEELIQATGVTTYGENIFYAGDVTESNYFRIPSLLTLSTGTVISAADARYGGTHDSKSKINIAFAKSTDGGNTWSEPTLPLKFDDYIAKNIDWPRDSVGKNVQIQGSASYIDPVLLEDKLTKRIFLFADLMPAGIGSSNASVGSGFKEVNGKKYLKLRWHKDAGRAYDYTIREKGVIYNDATNQPTEFRVDGEYNLYQHDTNLTCKQYDYNFSGNNLIESKTDVDVNMNIFYKNSVFKAFPTNYLAMRYSDDEGASWSDLDIVSSFKPEVSKFLVVGPGIGKQISTGENAGRLLVPLYSKSSAELGFMYSDDHGDNWTYVEADNLTGGATAEAQIVEMPDGSLKTYLRTGSNCIAEVTSIDGGETWSDRVPLQGISTTSYGTQLSVINYSQPIDGKPAIILSSPNATNGRKNGKIWIGLVNDTGNTGIDKYSVEWKYSYAVDTPQMGYSYSCLAELPDGQVGLLYEKYDSWSRNELHLKDILKFEKYSISELTGQASGN

SEQ ID NO: 93 - protein, 642 aa, Trypanosoma cruzi
MLAPGSSRVELFKRQSSKVPFEKDGKVTERVVHSFRLPALVNVDGVMVAIADARYETSNDNSLIDTVAKYSVDDGETWETQIAIKNSRASSVSRVVDPTVIVKGNKLYVLVGSYNSSRSYWTSHGDARDWDILLAVGEVTKSTAGGKITASIKWGSPVSLKEFFPAEMEGMHTNQFLGGAGVAIVASNGNLVYPVQVTNKKKQVFSKIFYSEDDGKTWKFGEGRSAFGCSEAVALEWEGKLIINTRVDYRRRLVYESSDMGNTWLEAVGTLSRVWGPSPKSNQPGSQSSFTAVTIEGMRVMLFTHPLNFKGRWLRDRLNLWLTDNQRIYNVGQVSIGDENSAHSSVLYKDDKLYCLHEINSNEVYSLVFARLVGELRIIKSVLQSWKNWDSHLSSICTPADPAASSSERGCGPAVTTVGLVGFLSHSATKTEWEDAYRCVNASTANAERVPNGLKFAGVGGGALWPVSQQGQNQRYRFANHAFTVVASVTIHEVPSVASPLLGASLDSSGGKKLLGLSYDEKHQWQPIYGSTPVTPTGSWETGKRYHVVLTMANKIGSVYIDGEPLQGSGQTVVPDERTPDISHFYVGGYKRSDMPTISHVTVNNVLLYNRQLNAEEIRTLFLSQDLIGTEAHMDSSSDTSA

SEQ ID NO: 94 - protein, 682 aa, Akkermansia muciniphila
MRLSLNKLMGLGLLCALGLSIPSVLGKESFEQARRGKFTTLSTKYGLMSCRNGVAEIGGGGKSGEASLRMFGGQDAELKLDLKDTPSREVRLSAWAERWTGQAPFEFSIVAIGPNGEKKIYDGKDIRTGGFHTKIETSVPAGTRSLVFRLTSPENKGMKLDDLFLVPCIPMKVNPQVEMSSSAYPVMVRIPCSPVLSLNVRTDGCLNPQFLTAVNLDFTGTTKLSDIESVAVIRGEEAPIIHHGEEPFPKDSSQVLGTVKLAGSARPQISVKGKMELEPGDNYLWACVTMKEGATLDGRVVVRPASVVADNKPVRVANAAPVVQRIGVAVVRHGDFKSKFYRIPGLARSRKGTLLAVYDIRYNHSGDLPANIDVGVSRSTDGGRTWSDVKIAIDDSKIAPSLGATRGVGDPAILVDEKTGRIWVAAIWSHRHSIWGSKSGDNSPEACGQLVLAYSDNDGLTWSRPINITEQTKNKDWRILFNGPGNGICMKDGTLVFAAQYWDGKGVPWSTIVYSKDRGKTWHCGTGVNQQTTEAQVIELEDGSVMINARCNWGGSRIVGVTKDLGQTWEKHPTNRTAQLKEPVCQGSLLAVDGVPGAGRVVLFSNPNTTSGRSHMTLKASTNDAGSWPEDKWLLYDARKGWGYSCLAPVDKNHVGVLYESQGALNFLKIPYKDVLNAKNAR

SEQ ID NO: 95 - protein, 544 aa, Bacteroides fragilis
MKKAVILFSLFCFLCAIPVVQAADTIFVRETRIPILIERQDNVLFYLRLDAKESQTLNDVVLNLGEGVNLSEIQSIKLYYGGTEALQDSGKKRFAPVGYISSNTPGKTLAANPSYSIKKSEVTNPGNQVVLKGDQKLFPGINYFWISLQMKPGTSLTSKVTADIASITLDGKKALLDVVSENGIEHRMGVGVRHAGDDNSAAFRIPGLVTTNKGTLLGVYDVRYNSSVDLQEHVDVGLSRSTDGGKTWEKMRLPLAFGEFGGLPAGQNGVGDPSILVDTKTNNVWVVAAWTHGMGNQRAWWSSHPGMDMNHTAQLVLAKSTDDGKTWSAPINITEQVKDPSWYFLLQGPGRGITMSDGTLVFPTQFIDSTRVPNAGIMYSKDGGKNWKMHNYARTNTTEAQVAEVEPGVLMLNMRDNRGGSRAVAITKDLGKTWTEHESSRKALPESVCMASLISVKAKDNVLGKDLLIFSNPNTTKGRYNTTIKISLDGGVTWSPEHQLLLDEGNNWGYSCLSMIDKETIGILYESSVAHMTFQAVKLKDIIK

SEQ ID NO: 96 - protein, 544 aa, Bacteroides thetaiotaomicron
MKRNHYLFTLILLLGCSIFVKASDTVFVHQTQIPILIERQDNVLFYFRLDAKESRMMDEIVLDFGKSVNLSDVQAVKLYYGGTEALQDKGKKRFAPVDYISSHRPGNTLAAIPSYSIKCAEALQPSAKVVLKSHYKLFPGINFFWISLQMKPETSLFTKISSELQSVKIDGKEAICEERSPKDIIHRMAVGVRHAGDDGSASFRIPGLVTSNKGTLLGVYDVRYNSSVDLQEYVDVGLSRSTDGGKTWEKMRLPLSFGEYDGLPAAQNGVGDPSILVDTQTNTIWVVAAWTHGMGNQRAWWSSHPGMDLYQTAQLVMAKSTDDGKTWSKPINITEQVKDPSWYFLLQGPGRGITMSDGTLVFPTQFIDSTRVPNAGIMYSKDRGKTWKMHNMARTNTTEAQVVETEPGVLMLNMRDNRGGSRAVAITKDLGKTWTEHPSSRKALQEPVCMASLIHVEAEDNVLDKDILLFSNPNTTRGRNHITIKASLDDGLTWLPEHQLMLDEGEGWGYSCLTMIDRETIGILYESSAAHMTFQAVKLKDLIR

SEQ ID NO: 97 - protein, 1321 aa, Bacteroides vulgatus
MKKQVLLIILLALPLWLKAADVSVTGLRTEQMVDPMGLDTAAPRMSWRLESSQRNVMQTAYRILVASSPELLAQDKGDLWDSGKVESDASVWIPYQGKRLKSNQRVYWKVRSYTNRGETEWSEPARWGMGPLGEIHWKGRWIGWDAAFAWDREDSHSRLSSRYLRTEFKTQAKEIKYATLHLCGLGMYELFINGQRIGDQVLAPAPSDYRRTVLYNSFDVTKQVAGGNADNAIGVTLGNGRFYTMRQNYKPYKIPTFGYPKLRLNLIIEYTDGSIQRINSDEKWRLTAQGPIRSNNEYDGEIYDARMELGNWTQPGYDDSKWLKAQRVSLPYGTLRGNTAPNMKVMKTLKPAVFKQYGDRYMIDFGQNMAGWVRINIAKAAAGDTICIRYAERVKNDGTELDVENLRHSQSTDYYICNGKENNTSWSSRFSYHGFQYVEVTGYKNLKAEDLVAEVVYDDLEDNGTFECSNDIMNRVYRNAWWGISSNYKGVPLDCPQRDERQPWLGDHAMGTWGESFMFNNGNTYAKWADDIREAQREDGCIPDICPAYYNYYTSEMTWSSTFPVICDMVYEQFGNIEPIRKNYAAIKKWMHHIRSEFTTEDGVINADKYGDWCMPPESPELIHSQDPARKTDGALIATAYYYKVSQMLAKFARLQGLEDEAKGFEKDAAKIKDCFNARFLTVKKGTSPVQTPHVLYPDSIFYGNNTVTANILPLAFDMVPEAYREEVEKNVITGIITRNKGHISSGVIGMNWMMRELTRMGRGDVAFLLASNKTYPSYGYMIEKGATAIWELWNGDTANRWMNSCNHVMILGDLLTWYFRDLAGFNPAQPAYKQIILKPDFSIQELSYVKASHNTLYGKMISNWKKTLTHLEWDITVPCNTTALVYLPTLDEKAVKDKDVTFVRREGNSTVWSVPSGNYHFSVSMDPSSGKNRAGIVEDQFLYEQASFPECHGATIVELKNGDLVASFFGGTKERNPDCCIWVCRKPKGATEWSAPYLAADGVFSLDDPQAVLAGITAESTPADAGPVVSTFKGDKSRARRKACWNPVLFQIPGGDLILFYKIGLKVADWSGWLVRSKDGGKTWSQREPLPKGFLGPIKNKPEYVDGRIICPSSTEGDGGWRIHFEISDDKGKTWKMVGPVEAEMSVPTALRKANAANVDDQEGGEAIKGEGEKPIYAIQPSILRHKDGRLQVLCRTRNAQIATSWSSDNGETWSKVTLLDVPNNNSGTDAVTMKDGRHVLIYNDFSTLPGTPKGPRTPLCVAVSDDGIHWKNVMTLEDSPISQYSYPSIIQGKDGKLHAVYTWRRQRVAYKELDLSKLK

SEQ ID NO: 98 - protein, 835 aa, Bifidobacterium bifidum
MVRSTKPSLLRRFGALVAAAAMLVVLPAGVSTASAASDDADMLTVTMTRTDALGDEVYVGDTLTYSFTNTNNTSSAFTAFPAESNLSGVLTTGTPNCRYENLAGGASYPCSTASHTITADDLTAGSFTPRTVWKATSDRGGTQVLQDNIVSTGDTVTVKEGKRPDPATIPTDRADGEAVRLATARQNLGTECYRIPALAEAPNGWILAAFDQRPNTAMANGSGVKCWDAPQPNSIVQRISKDGGKSWTPIQYVAQGKNAPERYGYSDPSYVVDKETGEIFLFFVHSYNKGFADSQLGVDESNRNVLHAVVVSSKDNGETWSKPRDITADITKGYENEWKSRFATSGAGIQLKYGKYKGRLIQQYAVGRTTGSNAAVSVYSDDHGKTWQAGNPVTGMLMDENKVVELSDGRVMLNSRPGAAGYRRVAISEDGGVNYGTVKNETQLPDPNNNAHITRAFPNAPEGSAKAKVLLYSSPRANNEGRANGVVRISLDDGTTWSSGKLYKEGSMAYSVITALSDAAGGGYGLLYEGAWVTGGGIDSHDIMYTHISMDWLGYLSATADDVTASVEEGASTVDVTVPVSNVGSVDYTGVTVTPADLPTGWSASPVNVGALASGTSKDVTVTVNVPATAKKDDVAKIVLRVTGTSAANANATTGFDGSITVNVTEKSEPDPEPEPTITGVSAVTSQAGVKVGDVFDASKVSVTAAMSDGSSKALAAGEYSLSAVDADGKAVDLAEPFAAAGVVTVTVSVPVEGAGPLTASFTIDVAEKSVDPEPKPEPEPKPEPEKPAGPKVDVPTEQPGLSKTGASTAGMSIVFVLLALSGIAALSLRRRSVH

SEQ ID NO: 99 - protein, 382 aa, Clostridium perfringens
MCNKNNTFEKNLDISHKPEPLILFNKDNNIWNSKYFRIPNIQLLNDGTILTFSDIRYNGPDDHAYIDIASARSTDFGKTWSYNIAMKNNRIDSTYSRVMDSTTVITNTGRIILIAGSWNTNGNWAMTTSTRRSDWSVQMIYSDDNGLTWSNKIDLTKDSSKVKNQPSNTIGWLGGVGSGIVMDDGTIVMPAQISLRENNENNYYSLIIYSKDNGETWTMGNKVPNSNTSENMVIELDGALIMSTRYDYSGYRAAYISHDLGTTWEIYEPLNGKILTGKGSGCQGSFIKATTSNGHRIGLISAPKNTKGEYIRDNIAVYMIDFDDLSKGVQEICIPYPEDGNKLGGGYSCLSFKNNHLGIVYEANGNIEYQDLTPYYSLINKQ

SEQ ID NO: 100 - protein, 382 aa, Clostridium perfringens; identical to SEQ ID NO: 70

SEQ ID NO: 101 - protein, 694 aa, Clostridium perfringens; identical to SEQ ID NO: 71

SEQ ID NO: 102 - protein, 694 aa, Clostridium perfringens
MNYKGITLILTAAMVISGGNYVLVKGSTLDSGKNNSGYEIKVNNSESLSSLGEYKDINLESSNASNITYDLEKYKNLDEGTIVVRFNSKDSKIQSLLGISNSKTKNGYFNFYVTNSRVGFELRNQKNEGNTQSGTENLVHMYKDVALNDGDNTVALKIEKNKGYKLFLNGKIIKEVKDTNTKFLNNIENLDSAFIGKTNRYGQSNEYNFKGNIGFMNIYNEPLGDDYLLSKTGETKAKEEVLVEGAVKTEPVDLFHPGFLNSSNYRIPALFKTKEGTLIASIDARRHGGADAPNNDIDTAVRRSEDGGKTWDEGQIIMDYPDKSSVIDTTLIQDDETGRIFLLVTHFPSKYGFWNAGLGSGFKNIDGKEYLCLYDSSGKEFTVRENVVYDKDGNKTEYTTNALGDLFKNGTKIDNINSSTAPLKAKGTSYINLVYSDDDGKTWSEPQNINFQVKKDWMKFLGIAPGRGIQIKNGEHKGRIVVPVYYTNEKGKQSSAVIYSDDSGKNWTIGESPNDNRKLENGKIINSKTLSDDAPQLTECQVVEMPNGQLKLFMRNLSGYLNIATSFDGGATWDETVEKDTNVLEPYCQLSVINYSQKIDGKDAVIFSNPNARSRSNGTVRIGLINQVGTYENGEPKYEFDWKYNKLVKPGYYAYSCLTELSNGNIGLLYEGTPSEEMSYIEMNLKYLESGANK

SEQ ID NO: 103 - protein, 1173 aa, Clostridium perfringens
MKSKKIIATLVASLVISNMGGYLVKANPNVNHKAVIIEDRQAIIETAIPQSEMTASATSEEGQDPASSAIDGNINTMWHTKWNGSDALPQSLSVNLGKARKVSSIAITPRTSGNNGFITKYEIHAINNGVETLVAEGTWEENNLVKTVTFDSPIDAEEIKITAIQGVGGFASIAELNVYEIKGEVDEIANYGNLKITKEEERLNITGDLEKFSSLDEGTIVTRFNMNDTSIQSLIGLSDGNKANNYFSLYVSGGKVGYELRRQEGNGDFNVHHSADVTFNKGINTLALKIEKGVGAKIFLNGSLVKTVSDPNIKFLNAINLNSGFIGKTDRANGYNEYLFRGNIDFMNIYDKPVSDNYLLRKTGETKAPSEDSLLPDDVYKTQPVELFYPGYLESRGYRIPALETTKKGTVLASIDVRNNGDHDAPNNNIDVGIRRKEVNGEWEEGKVILDYPGKSAAIDTSLMSATIEENGIEKERIFLIVTHFPEGYGFPNTEGGSGYKEIDGKYYFILKDAQNNEYTVREDGIVYNSEGNQTDYVMKNDKTLIQNGEEVGNALLSNSPLKAVGTAHIEMIYSDDDGKTWSEPEDLNPGLKKEWMKFFGTAPGKGIQIKNGEHKGRLVFPIYYTNQNNFQSSAVIYSDDFGETWKLGESPIDTASVSSETVSSGTQLTECQVVEMPNGQLKLFMRNTGSYTKIATSFDGGATWHDEVPEDTSLREPYCQLSVINYSGKINGKDAIIFSNPDASSRVNGSVKVGLINENGTYDNGEPRYEFDWIYNKTVKPGSFAYSCLTELPDGNLGLFYEGEGAGRMAYTEFDLNYLKFNASEDSPSASVQSIEVLDEDLAYNSGEEVSIKVNFNQLVSIIGDRKITLDIGGVDVPLNMVNYEGKSSAIFKGTIPEGINQGNYEIKLKENNTLELNTVYNKVSTFNGLDNTGINVQIGELKTTVGNSTIKVNDEVQVGSAFEAILGIEGLNGDTEVYSAEYLFEYNVEAFILNEITSFNDSLFVKSKEVEPGKVRILVASLGNEIEKDSDLVKVNLTPKISSELEVLGLTTALVGAGDGNTHDLELSSKEVKINEEASGEIVVNPVQNFEIPEINKKNVKLTWNAPITTEGLEGYVIYKDGKKLSEVPAESTEFVVSKLNRHTIYNFKVAAKYSNGELSAKESKTIRTAR

SEQ ID NO: 104 - protein, 773 aa, Clostridium tertium; identical to SEQ ID NO: 73

SEQ ID NO: 105 - protein, 489 aa, Ruminococcus gnavus
GAMADIGSNIFYAGDATKSNYFRIPSLLALDSGTVIAAADARYGGTHDAKSKINTAFAKSTDGGKTWGQPTLPLKFDDYVAKNIDWPRDSVGKNVQIQGSASYIDPVLLEDKETHRVFLFADMMPAGIGSSNASVGSGFKEVDGKKYLKLHWKDDAAGTYDYSVRENGTIYNDTTNSATEYSVDGEYNLYKNGNAMLCKQYDYNFEGTKLLETQTDTDVNMNVFYKDADFKVFPTTYLAMKYSDDEGETWSDLQIVSTFKPEESKFLVLGPGVGKQIANGEHAGRLIVPLYSKSSAELGFMYSDDHGNNWTYVEADQNTGGATAEAQIVEMPDGSLKTYLRTGSGYIAQVMSTDGGETWSERVPLTEIATTGYGTQLSVINYSQPVDGKPAILLSAPNATNGRKNGKIWIGLISETGNSGKDKYSVDWKYCYSVDTPQMGYSYSCLTELPDGEIGLLYEKYDSWSRNELHLKNILKYERFNIDELKVQP

SEQ ID NO: 106 - protein, 382 aa, Salmonella enterica; identical to SEQ ID NO: 30

SEQ ID NO: 107 - protein, 1014 aa, Clostridium septicum
MNKKKIMSILVSAFLITNLSSNIIFADIKENVYINQYSEGNRSQPIAEKLVPRSEIQASATSALTGEGPEKAIDGNTSTLWHTPWAGVDIQINPQSLTLKLGKTRNISSICVTPRQEGTNGMITDYKIYSGDDVIAEGKWKSDSSDKYVVFDNPISTDNIRIEAISTVGDENNKHASIAEVEVYELADTPVKLAESNNKVINNGNGGNYEGDISEISLLEEGTAIIRFTNNGSSLFSISNNERTNEHFHVYINGGAIGYELRKQSGNLATGSVNKALNAGINTIAFKAEKGKGYSIYLNGEKILTSSSITANFLSTLEGLNTLSLGKTDRPSGSNEYNFTGEIDFFELYSKPLADRYLKERTGETTSKDLPFPEGAVKTEPVDIFTPGELGSNNFRIPALYTTKDGTVLASIDVRKGGGHDAPNNIDTGIKRSTDGGVTWDEGKIILDYPGASSAIDTSLLQDDETGRIFLIVTHFAEGYGFGNSKTGSGYVEIEGKRYLKLLGANDTIYTVREGVVYDSNGEATNYTVDNNNELYENGNRIGNVLLSNSPLKVMGTSFLSLIYSDDDGQTWSDPIDLNKEVKTDWMRFLGTGPGKGHQIKTGRYAGRLLFPVYLTNASGFQSSAVIYSDDNGATWNIGETATDGRLMDNGDRASAETITTNTSGGVGQLTECQVVEMPNGQLKMFMRNTGGNSGRVRIATSFDGGATWEDDVVRDENIKEPYCQLSVINYSQKIDGKDAIIFAIPDANYPNRVNGTVRVGLITENGSYENGEPRYDIEWRYNKVVAPGTYGYSCLSEMPNGEIGLFYEGRGSRQMSFTRMNIDYLKADLLQDVPAANIKSYTTNSENNIYDPGDKISLNVTFDQTVSLIGDRTITADIGGKEVLLTLANSKGGSEYTFEGTVPADISNGNYTITIKGKSGLKIVNVVNKVTDITEDRNTGLNVQVGEEVQSVDKTLLQDLVDSTSNLIKEDYTEESWILYEKALEVANKFLVNEIAVQEEVDAAKPTLENAYK

SEQ ID NO: 108 - protein, 1035 aa, Streptococcus pneumoniae; identical to SEQ ID NO: 88

SEQ ID NO: 109 - protein, 45 aa, Artificial Sequence
  Description of Artificial Sequence: Synthetic polypeptide
LKEAKEKAIEELKKAGITSDYYFDLINKAKTVEGVNALKDEILKA

SEQ ID NO: 110 - protein, 15 aa, Artificial Sequence
  Description of Artificial Sequence: Synthetic peptide
  MISC_FEATURE (1)..(15): This sequence may encompass 1-5 "Gly Gly Pro" repeating units
GGPGGPGGPGGPGGP

SEQ ID NO: 111 - protein, 25 aa, Artificial Sequence
  Description of Artificial Sequence: Synthetic peptide
  MISC_FEATURE (1)..(25): This sequence may encompass 1-5 "Gly Gly Gly Gly Ser" repeating units
GGGGSGGGGSGGGGSGGGGSGGGGS

SEQ ID NO: 112 - protein, 10 aa, Artificial Sequence
  Description of Artificial Sequence: Synthetic peptide
GGGGSGGGGS

SEQ ID NO: 113 - protein, 616 aa, Artificial Sequence
  Description of Artificial Sequence: Synthetic polypeptide
ASLPVLQKESVFQSGAHAYRIPALLYLPGQQSLLAFAEQRASKKDEHAELIVLRRGDYDAPTHQVQWQAQEVVAQARLDGHRSMNPCPLYDAQTGTLFLFFIAIPGQVTEQQQLQTRANVTRLCQVTSTDHGRTWSSPRDLTDAAIGPAYREWSTFAVGPGHCLQLHDRARSLVVPAYAYRKLHPIQRPIPSAFCFLSHDHGRTWARGHFVAQDTLECQVAEVETGEQRVVTLNARSHLRARVQAQSTNDGLDFQESQLVKKLVEPPPQGCQGSVISFPSPRSGPGSPAQWLLYTHPTHSWQRADLGAYLNPRPPAPEAWSEPVLLAKGSCAYSDLQSMGTGPDGSPLFGCLYEANDYEEIVFLMFTLKQAFPAEYLPQGGGGSGGGGSDKTHTCPPCPAPELLGGPSVFLFPPKPKDTLMISRTPEVTCVVVDVSHEDPEVKFNWYVDGVEVHNAKTKPREEQYNSTYRVVSVLTVLHQDWLNGKEYKCKVSNKALPAPIEKTISKAKGQPREPQVYTLPPSREEMTKNQVSLTCLVKGFYPSDIAVEWESNGQPENNYKTTPPVLDSDGSFFLTSKLTVDKSRWQQGNVFSCSVMHEALHNHYTQKSLSLSPGK

SEQ ID NO: 114 - DNA, 1848 bp, Artificial Sequence
  Description of Artificial Sequence: Synthetic polynucleotide
gcatctctgcctgtgctgcagaaagaaagcgtgttccagtctggcgcccacgcctacagaattcccgctctgctgtatctgccaggccagcagtctctgctggctttcgctgaacagcgggccagcaagaaggatgagcacgccgaactgatcgtgctgcggagaggcgattacgacgcccctacacatcaggtgcagtggcaggctcaagaggtggtggctcaggctagactggacggccacagatctatgaacccctgtcctctgtacgatgcccagaccggcacactgtttctgttctttatcgctatccccggccaagtgaccgagcagcagcagctgcagacaagagccaacgtgaccagactgtgtcaagtgacctccaccgaccacggcagaacctggtctagccctagagatctgaccgacgccgccatcggacctgcctatagagagtggtccaccttcgccgttggacctggacactgtctccagctgcacgacagggctagatctctggtggtgcctgcctacgcctatagaaagctgcaccccatccagcggcctattcctagcgccttctgctttctgagccacgatcacggcaggacatgggccagaggacatttcgtggcccaggacacactggaatgccaggtggccgaagtggaaaccggcgagcagagagtcgtgaccctgaacgccagatctcacctgagagccagagtgcaggcccagagcacaaacgacggcctggatttccaagagagccagctggtcaagaaactggtggaacctcctccacagggctgtcagggaagcgtgatcagctttccatctcctagaagcggccctggctctcctgctcagtggctgctgtatacacaccccacacacagctggcagagagccgatctgggcgcctacctgaatcctagacctcctgctcctgaggcttggagcgaacctgttctgctggccaagggcagctgtgcctacagcgatctgcagtctatgggcacaggccctgatggcagccctctgtttggctgtctgtacgaggccaacgactacgaagagatcgtgttcctgatgttcaccctgaagcaggcctttccagccgagtacctgcctcaaggcggaggtggaagtggcggaggcggatccgacaaaactcacacatgcccaccgtgcccagcacctgaactcctggggggaccgtcagtcttcctcttccccccaaaacccaaggacaccctcatgatctcccggacccctgaggtcacatgcgtggtggtggacgtgagccacgaagaccctgaggtcaagttcaactggtacgtggacggcgtggaggtgcataatgccaagacaaagccgcgggaggagcagtacaacagcacgtaccgtgtggtcagcgtcctcaccgtcctgcaccaggactggctgaatggcaaggagtacaagtgcaaggtctccaacaaagccctcccagcccccatcgagaaaaccatctccaaagccaaagggcagccccgagaaccacaggtctacaccctgcccccatcccgggaggagatgaccaagaaccaggtcagcctgacctgcctggtcaaaggcttctatcccagcgacatcgccgtggagtgggagagcaatgggcagccggagaacaactacaagaccacgcctcccgtgctggactccgacggctccttcttcctctacagcaagctcaccgtggacaagagcaggtggcagcaggggaacgtcttctcatgctccgtgatgcatgaggctctgcacaaccactacacgcagaagagcctctccctgtctccgggtaaa

SEQ ID NO: 115 - protein, 617 aa, Artificial Sequence
  Description of Artificial Sequence: Synthetic polypeptide
DASLPYLQKESVFQSGAHAYRIPALLYLPGQQSLLAFAEQRASKKDEHAELIVLRRGDYDAGTHQVQWQAQEVVAQARLDGHRSMNPCPLYDEQTGTLFLFFIAIPGQVTEQQQLQTRANVTRLCQVTSTDHGRTWSSPRDLTDAAIGPAYREWSTFAVGPGHCLQLHDRARSLVVPAYAYRKLHPKQRPIPSAFCFLSHDHGRTWARGHFVAQDTLECQVAEVETGEQRVVTLNARSHLRARVQAQSTNDGLDFQESQLVKKLVEPPPQGCQGSVISFPSPRSGPGSPAQWLLYTHPTHSWQRADLGAYLNPRPPAPEAWSEPVLLAKGSAAYSDLQSMGTGPDGSPLFGCLYEANDYEEIVFLMFTLKQAFPAEYLPQGGGGSGGGGSDKTHTCPPCPAPELLGGPSVFLFPPKPKDTLMISRTPEVTCVVVDVSHEDPEVKFNWYVDGVEVHNAKTKPREEQYNSTYRVVSVLTVLHQDWLNGKEYKCKVSNKALPAPIEKTISKAKGQPREPQVYTLPPSREEMTKNQVSLTCLVKGFYPSDIAVEWESNGQPENNYKTTPPVLDSDGSFFLTSKLTVDKSRWQQGNVFSCSVMHEALHNHYTQKSLSLSPGK

SEQ ID NO: 116 - DNA, 1851 bp, Artificial Sequence
  Description of Artificial Sequence: Synthetic polynucleotide
gatgcatctctgccttacctgcagaaagaaagcgtgttccagtctggcgcccacgcctacagaattcccgctctgctgtatctgccaggccagcagtctctgctggctttcgctgaacagcgggccagcaagaaggatgagcacgccgaactgatcgtgctgcggagaggcgattacgacgccggcacacatcaggtgcagtggcaggctcaagaggtggtggctcaggctagactggacggccacagatctatgaacccctgtcctctgtacgatgaacagaccggcacactgtttctgttctttatcgctatccccggccaagtgaccgagcagcagcagctgcagacaagagccaacgtgaccagactgtgtcaagtgacctccaccgaccacggcagaacctggtctagccctagagatctgaccgacgccgccatcggacctgcctatagagagtggtccaccttcgccgttggacctggacactgtctccagctgcacgacagggctagatctctggtggtgcctgcctacgcctatagaaagctgcaccccaaacagcggcctattcctagcgccttctgctttctgagccacgatcacggcaggacatgggccagaggacatttcgtggcccaggacacactggaatgccaggtggccgaagtggaaaccggcgagcagagagtcgtgaccctgaacgccagatctcacctgagagccagagtgcaggcccagagcacaaacgacggcctggatttccaagagagccagctggtcaagaaactggtggaacctcctccacagggctgtcagggaagcgtgatcagctttccatctcctagaagcggccctggctctcctgctcagtggctgctgtatacacaccccacacacagctggcagagagccgatctgggcgcctacctgaatcctagacctcctgctcctgaggcttggagcgaacctgttctgctggccaagggcagcgctgcctacagcgatctgcagtctatgggcacaggccctgatggcagccctctgtttggctgtctgtacgaggccaacgactacgaagagatcgtgttcctgatgttcaccctgaagcaggcctttccagccgagtacctgcctcaaggcggaggtggaagtggcggaggcggatccgacaaaactcacacatgcccaccgtgcccagcacctgaactcctggggggaccgtcagtcttcctcttccccccaaaacccaaggacaccctcatgatctcccggacccctgaggtcacatgcgtggtggtggacgtgagccacgaagaccctgaggtcaagttcaactggtacgtggacggcgtggaggtgcataatgccaagacaaagccgcgggaggagcagtacaacagcacgtaccgtgtggtcagcgtcctcaccgtcctgcaccaggactggctgaatggcaaggagtacaagtgcaaggtctccaacaaagccctcccagcccccatcgagaaaaccatctccaaagccaaagggcagccccgagaaccacaggtctacaccctgcccccatcccgggaggagatgaccaagaaccaggtcagcctgacctgcctggtcaaaggcttctatcccagcgacatcgccgtggagtgggagagcaatgggcagccggagaacaactacaagaccacgcctcccgtgctggactccgacggctccttcttcctcactagcaagctcaccgtggacaagagcaggtggcagcaggggaacgtcttctcatgctccgtgatgcatgaggctctgcacaaccactacacgcagaagagcctctccctgtctccgggtaaa

SEQ ID NO: 117 - protein, 658 aa, Artificial Sequence
  Description of Artificial Sequence: Synthetic polypeptide
EEVTTCSFNSPLFRQEDDRGITYRIPALLYIPPTHTFLAFAEKRSTRRDEDALHLVLRRGLRIGQLVQWGPLKPLMEATLPGHRTMNPCPVWEQKSGCVFLFFICVRGHVTERQQIVSGRNAARLCFIYSQDAGCSWSEVRDLTEEVIGSELKHWATFAVGPGHGIQLQSGRLVIPAYTYRKLHPKQRTRPHSLMIYSDDLGVTWHHGRLIRPMVTVECEVAEVTGRAGHPVLYCSARTPNRCRAEALSTDHGEGFQRLALSRQLCEPPHGCQGSVVSFRPLEIPHRCQDSSSKDAPTIQQSSPGSSLRLEEEAGTPSESWLLYSHPTSRKQRVDLGIYLNQTPLEAACWSRPWILHCGPCGYSDLAALEEEGLFGCLFECGTKQECEQIAFRLFTHREILSHLQGDCTSPGRNPSQFKSNGGGGSGGGGSDKTHTCPPCPAPELLGGPSVFLFPPKPKDTLMISRTPEVTCVVVDVSHEDPEVKFNWYVDGVEVHNAKTKPREEQYNSTYRVVSVLTVLHQDWLNGKEYKCKVSNKALPAPIEKTISKAKGQPREPQVYTLPPSREEMTKNQVSLTCLVKGFYPSDIAVEWESNGQPENNYKTTPPVLDSDGSFFLYSKLTVDKSRWQQGNVFSCSVMHEALHNHYTQKSLSLSPGK

SEQ ID NO: 118 - DNA, 1974 bp, Artificial Sequence
  Description of Artificial Sequence: Synthetic polynucleotide
gaggaagtgaccacctgtagcttcaacagccctctgttccggcaagaggacgaccggggcatcacctacagaatccctgctctgctctacatccctcctacacacacctttctggccttcgccgagaagcggagcaccagacgagatgaagatgccctgcacctggtgctgagaagaggcctgagaatcggacagctggtgcagtggggacctctgaagcctctgatggaagccacactgcccggccacagaaccatgaatccttgtcctgtgtgggagcagaaaagcggctgcgtgttcctgttcttcatctgcgtgcggggccacgtgaccgagagacagcaaatcgtgtccggcagaaacgccgccagactgtgcttcatctacagccaggatgccggctgctcttggagcgaagttcgggatctgaccgaagaagtgatcggcagcgagctgaagcactgggccacatttgctgttggccctggccacggaatccagctgcaatctggcagactggtcatccccgcctacacctacagaaagctgcaccccaaacagcggacccggcctcacagcctgatgatctacagcgacgatctgggcgtgacatggcaccacggcagactgatcagacccatggtcaccgtggaatgcgaggtggccgaagtgacaggcagagctggacaccctgtgctgtactgctctgccagaacacccaaccggtgtagagccgaggctctgtctacagatcacggcgagggctttcagagactggccctctctagacagctgtgcgaacctcctcatggctgtcagggcagcgtggtgtccttcagacctctggaaatccctcaccggtgccaggacagcagctctaaggatgcccctaccatccagcagtctagccctggcagcagcctgagactggaagaggaagccggaacacctagcgagagctggctgctgtactctcaccccaccagcagaaagcagagagtggacctgggcatctacctgaatcagacccctctggaagccgcctgttggagcagaccttggattctgcactgtggcccttgcggctactctgatctggccgctctggaagaagagggcctgttcggctgcctgtttgagtgcggcacaaagcaagagtgcgagcagatcgccttccggctgttcacccacagagagatcctgagccatctgcagggcgactgcacaagcccaggcagaaatcccagccagttcaagagcaacggcggaggtggaagtggcggaggcggatccgacaaaactcacacatgcccaccgtgcccagcacctgaactcctggggggaccgtcagtcttcctcttccccccaaaacccaaggacaccctcatgatctcccggacccctgaggtcacatgcgtggtggtggacgtgagccacgaagaccctgaggtcaagttcaactggtacgtggacggcgtggaggtgcataatgccaagacaaagccgcgggaggagcagtacaacagcacgtaccgtgtggtcagcgtcctcaccgtcctgcaccaggactggctgaatggcaaggagtacaagtgcaaggtctccaacaaagccctcccagcccccatcgagaaaaccatctccaaagccaaagggcagccccgagaaccacaggtctacaccctgcccccatcccgggaggagatgaccaagaaccaggtcagcctgacctgcctggtcaaaggcttctatcccagcgacatcgccgtggagtgggagagcaatgggcagccggagaacaactacaagaccacgcctcccgtgctggactccgacggctccttcttcctctatagcaagctcaccgtggacaagagcaggtggcagcaggggaacgtcttctcatgctccgtgatgcatgaggctctgcacaaccactacacgcagaagagcctctccctgtctccgggtaaa

SEQ ID NO: 119 - protein, 618 aa, Artificial Sequence
  Description of Artificial Sequence: Synthetic polypeptide
TVEKSVVFKAEGEHFTDQKGNTIVGSGSGGTTKYFRIPAMCTTSKGTIVVFADARHNTASDQSFIDTAAARSTDGGKTWNKKIAIYNDRVNSKLSRVMDPTCIVANIQGRETILVMVGKWNNNDKTWGAYRDKAPDTDWDLVLYKSTDDGVTFSKVETNIHDIVTKNGTISAMLGGVGSGLQLNDGKLVFPVQMVRTKNITTVLNTSFIYSTDGITWSLPSGYCEGFGSENNIIEFNASLVNNIRNSGLRRSFETKDFGKTWTEFPPMDKKVDNRNHGVQGSTITIPSGNKLVAAHSSAQNKNNDYTRSDISLYAHNLYSGEVKLIDDFYPKVGNASGAGYSCLSYRKNVDKETLYVVYEANGSIEFQDLSRHLPVIKSYNGGGGSGGGGSDKTHTCPPCPAPELLGGPSVFLFPPKPKDTLMISRTPEVTCVVVDVSHEDPEVKFNWYVDGVEVHNAKTKPREEQYNSTYRVVSVLTVLHQDWLNGKEYKCKVSNKALPAPIEKTISKAKGQPREPQVYTLPPSREEMTKNQVSLTCLVKGFYPSDIAVEWESNGQPENNYKTTPPVLDSDGSFFLTSKLTVDKSRWQQGNVFSCSVMHEALHNHYTQKSLSLSPGK

SEQ ID NO: 120 - protein, 618 aa, Artificial Sequence
  Description of Artificial Sequence: Synthetic polypeptide
TVEKSVVFKAEGEHFTDQKGNTIVGSGSGGTTKYFRIPAMCTTSKGTIVVFADARHNTASDQSFIDTAAARSTDGGKTWNKKIAIYNDRVNSKLSRVMDPTCIVANIQGRETILVMVGKWNNNDKTWGAYRDKAPDTDWDLVLYKSTDDGVTFSKVETNIHDIVTKNGTISAMLGGVGSGLQLNDGKLVFPVQMVRTKNITTVLNTSFIYSTDGITWSLPSGYCEGFGSENNIIEFNASLVNNIRNSGLRRSFETKDFGKTWTEFPPMDKKVDNRNHGVQGSTITIPSGNKLVAAHSSAQNKNNDYTRSDISLYAHNLYSGEVKLIDDFYPKVGNASGAGYSCLSYRKNVDKETLYVVYEANGSIEFQDLSRHLPVIKSYNGGGGSGGGGSDKTHTCPPCPAPELLGGPSVFLFPPKPKDTLMISRTPEVTCVVVDVSHEDPEVKFNWYVDGVEVHNAKTKPREEQYNSTYRVVSVLTVLHQDWLNGKEYKCKVSNKALPAPIEKTISKAKGQPREPQVYTLPPSREEMTKNQVSLYCLVKGFYPSDIAVEWESNGQPENNYKTTPPVLDSDGSFFLYSKLTVDKSRWQQGNVFSCSVMHEALHNHYTQKSLSLSPGK

SEQ ID NO: 121 - DNA, 1854 bp, Artificial Sequence
  Description of Artificial Sequence: Synthetic polynucleotide
acagtggaaaagtccgtggtgttcaaggccgagggcgagcacttcaccgaccagaaaggcaataccatcgtcggctctggcagcggcggcaccaccaagtactttagaatccccgccatgtgcaccaccagcaagggcaccattgtggtgttcgccgacgccagacacaacaccgccagcgatcagagcttcatcgataccgctgccgccagaagtacagacggcggcaagacctggaacaagaagatcgccatctacaacgaccgcgtgaacagcaagctgagcagagtgatggaccctacctgcatcgtggccaacatccagggcagagaaaccatcctggtcatggtcggaaagtggaacaacaacgataagacctggggcgcctacagagacaaggcccctgataccgattgggacctcgtgctgtataagagcaccgacgacggcgtgaccttcagcaaggtggaaacaaacatccacgacatcgtgaccaagaacggcaccatctctgccatgctcggcggcgttggatctggcctgcaactgaatgatggcaagctggtgttccccgtgcagatggtccgaacaaagaacatcaccaccgtgctgaataccagcttcatctactccaccgacggcatcacatggtccctgcctagcggctactgtgaaggctttggcagcgagaacaacatcatcgagttcaacgccagcctggtcaacaacatccggaacagcggcctgcggagaagcttcgagacaaaggacttcggaaagacgtggaccgagtttcctccaatggacaagaaggtggacaaccggaaccacggcgtgcagggcagcacaatcacaatccctagcggcaacaaactggtggccgctcactctagcgcccagaacaagaacaacgattacaccagaagcgacatcagcctgtacgcccacaacctgtactccggcgaagtgaagctgatcgacgacttctaccccaaagtgggcaatgccagcggagccggctacagctgtctgagctaccggaaaaatgtggacaaagaaaccctgtacgtggtgtacgaggccaacggcagcatcgagtttcaggacctgagcagacatctgcccgtgatcaagagctacaatggcggaggtggaagtggcggaggcggatccgacaaaactcacacatgcccaccgtgcccagcacctgaactcctggggggaccgtcagtcttcctcttccccccaaaacccaaggacaccctcatgatctcccggacccctgaggtcacatgcgtggtggtggacgtgagccacgaagaccctgaggtcaagttcaactggtacgtggacggcgtggaggtgcataatgccaagacaaagccgcgggaggagcagtacaacagcacgtaccgtgtggtcagcgtcctcaccgtcctgcaccaggactggctgaatggcaaggagtacaagtgcaaggtctccaacaaagccctcccagcccccatcgagaaaaccatctccaaagccaaagggcagccccgagaaccacaggtctacaccctgcccccatcccgggaggagatgaccaagaaccaggtcagcctgacctgcctggtcaaaggcttctatcccagcgacatcgccgtggagtgggagagcaatgggcagccggagaacaactacaagaccacgcctcccgtgctggactccgacggctccttcttcctcactagcaagctcaccgtggacaagagcaggtggcagcaggggaacgtcttctcatgctccgtgatgcatgaggctctgcacaaccactacacgcagaagagcctctccctgtctccgggtaaa

SEQ ID NO: 122 - DNA, 1854 bp, Artificial Sequence
  Description of Artificial Sequence: Synthetic polynucleotide
acagtggaaaagtccgtggtgttcaaggccgagggcgagcacttcaccgaccagaaaggcaataccatcgtcggctctggcagcggcggcaccaccaagtactttagaatccccgccatgtgcaccaccagcaagggcaccattgtggtgttcgccgacgccagacacaacaccgccagcgatcagagcttcatcgataccgctgccgccagaagtacagacggcggcaagacctggaacaagaagatcgccatctacaacgaccgcgtgaacagcaagctgagcagagtgatggaccctacctgcatcgtggccaacatccagggcagagaaaccatcctggtcatggtcggaaagtggaacaacaacgataagacctggggcgcctacagagacaaggcccctgataccgattgggacctcgtgctgtataagagcaccgacgacggcgtgaccttcagcaaggtggaaacaaacatccacgacatcgtgaccaagaacggcaccatctctgccatgctcggcggcgttggatctggcctgcaactgaatgatggcaagctggtgttccccgtgcagatggtccgaacaaagaacatcaccaccgtgctgaataccagcttcatctactccaccgacggcatcacatggtccctgcctagcggctactgtgaaggctttggcagcgagaacaacatcatcgagttcaacgccagcctggtcaacaacatccggaacagcggcctgcggagaagcttcgagacaaaggacttcggaaagacgtggaccgagtttcctccaatggacaagaaggtggacaaccggaaccacggcgtgcagggcagcacaatcacaatccctagcggcaacaaactggtggccgctcactctagcgcccagaacaagaacaacgattacaccagaagcgacatcagcctgtacgcccacaacctgtactccggcgaagtgaagctgatcgacgacttctaccccaaagtgggcaatgccagcggagccggctacagctgtctgagctaccggaaaaatgtggacaaagaaaccctgtacgtggtgtacgaggccaacggcagcatcgagtttcaggacctgagcagacatctgcccgtgatcaagagctacaatggcggaggtggaagtggcggaggcggatccgacaaaactcacacatgcccaccgtgcccagcacctgaactcctggggggaccgtcagtcttcctcttccccccaaaacccaaggacaccctcatgatctcccggacccctgaggtcacatgcgtggtggtggacgtgagccacgaagaccctgaggtcaagttcaactggtacgtggacggcgtggaggtgcataatgccaagacaaagccgcgggaggagcagtacaacagcacgtaccgtgtggtcagcgtcctcaccgtcctgcaccaggactggctgaatggcaaggagtacaagtgcaaggtctccaacaaagccctcccagcccccatcgagaaaaccatctccaaagccaaagggcagccccgagaaccacaggtctacaccctgcccccatcccgggaggagatgaccaagaaccaggtcagcctgtactgcctggtcaaaggcttctatcccagcgacatcgccgtggagtgggagagcaatgggcagccggagaacaactacaagaccacgcctcccgtgctggactccgacggctccttcttcctctatagcaagctcaccgtggacaagagcaggtggcagcaggggaacgtcttctcatgctccgtgatgcatgaggctctgcacaaccactacacgcagaagagcctctccctgtctccgggtaaa

SEQ ID NO: 123 - protein, 617 aa, Artificial Sequence
  Description of Artificial Sequence: Synthetic polypeptide
DASLPYLQKESVFQSGAHAYRIPALLYLPGQQSLLAFAEQRASKKDEHAELIVLRRGDYDAPTHQVQWQAQEVVAQARLDGHRSMNPCPLYDAQTGTLFLFFIAIPGQVTEQQQLQTRANVTRLCQVTSTDHGRTWSSPRDLTDAAIGPAYREWSTFAVGPGHCLQLHDRARSLVVPAYAYRKLHPKQRPIPSAFCFLSHDHGRTWARGHFVAQDTLECQVAEVETGEQRVVTLNARSHLRARVQAQSTNDGLDFQESQLVKKLVEPPPQGCQGSVISFPSPRSGPGSPAQWLLYTHPTHSWQRADLGAYLNPRPPAPEAWSEPVLLAKGSAAYSDLQSMGTGPDGSPLFGCLYEANDYEEIVFLMFTLKQAFPAEYLPQGGGGSGGGGSDKTHTCPPCPAPELLGGPSVFLFPPKPKDTLMISRTPEVTCVVVDVSHEDPEVKFNWYVDGVEVHNAKTKPREEQYNSTYRVVSVLTVLHQDWLNGKEYKCKVSNKALPAPIEKTISKAKGQPREPQVYTLPPSREEMTKNQVSLTCLVKGFYPSDIAVEWESNGQPENNYKTTPPVLDSDGSFFLTSKLTVDKSRWQQGNVFSCSVMHEALHNHYTQKSLSLSPGK

SEQ ID NO: 124 - protein, 214 aa, Artificial Sequence
  Description of Artificial Sequence: Synthetic polypeptide
DIQMTQSPSSLSASVGDRVTITCRASQDVNTAVAWYQQKPGKAPKLLIYSASFLYSGVPSRFSGSRSGTDFTLTISSLQPEDFATYYCQQHYTTPPTFGQGTKVEIKRTVAAPSVFIFPPSDEQLKSGTASVVCLLNNFYPREAKVQWKVDNALQSGNSQESVTEQDSKDSTYSLSSTLTLSKADYEKHKVYACEVTHQGLSSPVTKSFNRGEC

SEQ ID NO: 125 - DNA, 642 bp, Artificial Sequence
  Description of Artificial Sequence: Synthetic polynucleotide
gacatccagatgacacagagccctagcagcctgtctgccagcgtgggagacagagtgaccatcacctgtagagccagccaggacgtgaacacagccgtggcttggtatcagcagaagcctggcaaggcccctaagctgctgatctacagcgccagctttctgtactccggcgtgcccagcagattcagcggctctagaagcggcaccgacttcaccctgaccataagcagtctgcagcccgaggacttcgccacctactactgtcagcagcactacaccacacctccaacctttggccagggcaccaaggtggaaatcaagcgtacggtggctgcaccatctgtcttcatcttcccgccatctgatgagcagttgaaatctggaactgcctctgttgtgtgcctgctgaataacttctatcccagagaggccaaagtacagtggaaggtggataacgccctccaatcgggtaactcccaggagagtgtcacagagcaggacagcaaggacagcacctacagcctcagcagcaccctgacgctgagcaaagcagactacgagaaacacaaagtctacgcctgcgaagtcacccatcagggcctgagctcgcccgtcacaaagagcttcaacaggggagagtgt

SEQ ID NO: 126 - protein, 450 aa, Artificial Sequence
  Description of Artificial Sequence: Synthetic polypeptide
EVQLVESGGGLVQPGGSLRLSCAASGFNIKDTYIHWVRQAPGKGLEWVARIYPTNGYTRYADSVKGRFTISADTSKNTAYLQMNSLRAEDTAVYYCSRWGGDGFYAMDYWGQGTLVTVSSASTKGPSVFPLAPSSKSTSGGTAALGCLVKDYFPEPVTVSWNSGALTSGVHTFPAVLQSSGLYSLSSVVTVPSSSLGTQTYICNVNHKPSNTKVDKKVEPKSCDKTHTCPPCPAPELLGGPSVFLFPPKPKDTLMISRTPEVTCVVVDVSHEDPEVKFNWYVDGVEVHNAKTKPREEQYNSTYRVVSVLTVLHQDWLNGKEYKCKVSNKALPAPIEKTISKAKGQPREPQVYTLPPSREEMTKNQVSLYCLVKGFYPSDIAVEWESNGQPENNYKTTPPVLDSDGSFFLYSKLTVDKSRWQQGNVFSCSVMHEALHNHYTQKSLSLSPGK

SEQ ID NO: 127 - DNA, 1350 bp, Artificial Sequence
  Description of Artificial Sequence: Synthetic polynucleotide
gaggtgcagctggttgaatctggcggaggactggttcagcctggcggatctctgagactgtcttgtgccgccagcggcttcaacatcaaggacacctacatccactgggtccgacaggcccctggcaaaggacttgaatgggtcgccagaatctaccccaccaacggctacaccagatacgccgactctgtgaagggcagattcaccatcagcgccgacaccagcaagaacaccgcctacctgcagatgaacagcctgagagccgaggacaccgccgtgtactactgttctagatggggaggcgacggcttctacgccatggattattggggccagggcaccctggtcaccgtttcttctgctagcaccaagggcccatccgtcttccccctggcaccctcctccaagagcacctctgggggcacagcggccctgggctgcctggtcaaggactacttccccgaaccggtgacggtgtcctggaactcaggcgctctgaccagcggcgtgcacaccttcccggctgtcctacagtcctcaggactctactccctcagcagcgtggtgaccgtgccctccagcagcttgggcacccagacctacatctgcaacgtgaatcacaagcccagcaacaccaaggtggacaagaaagttgagcccaaatcttgtgacaaaactcacacatgcccaccgtgcccagcacctgaactcctggggggaccgtcagtcttcctcttccccccaaaacccaaggacaccctcatgatctcccggacccctgaggtcacatgcgtggtggtggacgtgagccacgaagaccctgaggtcaagttcaactggtacgtggacggcgtggaggtgcataatgccaagacaaagccgcgggaggagcagtacaacagcacgtaccgtgtggtcagcgtcctcaccgtcctgcaccaggactggctgaatggcaaggagtacaagtgcaaggtctccaacaaagccctcccagcccccatcgagaaaaccatctccaaagccaaagggcagccccgagaaccacaggtctacaccctgcccccatcccgggaggagatgaccaagaaccaggtcagcctgtactgcctggtcaaaggcttctatcccagcgacatcgccgtggagtgggagagcaatgggcagccggagaacaactacaagaccacgcctcccgtgctggactccgacggctccttcttcctctatagcaagctcaccgtggacaagagcaggtggcagcaggggaacgtcttctcatgctccgtgatgcatgaggctctgcacaaccactacacgcagaagagcctctccctgtctccgggtaaa

SEQ ID NO: 128 - DNA, 1854 bp, Artificial Sequence
  Description of Artificial Sequence: Synthetic polynucleotide
gacgcctctttaccctatttacagaaggagagcgtctttcagtccggcgctcacgcctataggatccccgctttactgtatttacccggtcagcagtctttactggctttcgccgagcagcgggcttccaagaaggacgagcacgctgagctgatcgtgttacgtaggggagactacgacgcccccacccatcaagttcaatggcaagctcaagaagtggtggctcaagctcggctcgatggccatcggagcatgaacccttgtcccctctacgacgcccaaaccggcactttatttctgttcttcatcgccatccccggtcaagttaccgagcagcaacagctgcagacccgggctaacgtgacaaggctgtgccaagttacctccaccgaccacggaaggacttggtcctcccctcgtgatctgaccgatgccgctatcggccccgcttaccgggagtggtccacctttgccgtgggacccggccattgtctgcagctgcatgatagggctcggtctttagtggtgcccgcttacgcctaccggaagctgcaccccaagcagcggcctatcccctccgctttttgttttttaagccatgaccatggtcgtacttgggctcgtggccattttgtggcccaagatactttagagtgccaagttgccgaggtggagactggtgagcagcgggtggtgactttaaatgcccggtcccatttaagggctagggtgcaagcccagtccaccaacgacggactggatttccaagaatcccagctggtgaagaagctcgtcgaacctcccccccaaggttgccaaggaagcgtgatctccttcccctcccctaggagcggacccggttcccccgctcagtggctgctctacacccatcccacccattcttggcagagggctgatttaggcgcctatttaaaccctcgtcctcccgctcccgaagcttggagcgagcccgtgctgctcgctaagggcagcgccgcctacagcgatttacagtccatgggaaccggacccgatggcagccctctgttcggctgtttatatgaggctaacgactacgaggagatcgtgtttctcatgttcactttaaagcaagcttttcccgctgagtatctgccccaaggtggaggcggcagcggcggcggcggctccgacaaaactcacacatgcccaccgtgcccagcacctgaactcctggggggaccgtcagtcttcctcttccccccaaaacccaaggacaccctcatgatctcccggacccctgaggtcacatgcgtggtggtggacgtgagccacgaagaccctgaggtcaagttcaactggtacgtggacggcgtggaggtgcataatgccaagacaaagccgcgggaggagcagtacaacagcacgtaccgtgtggtcagcgtcctcaccgtcctgcaccaggactggctgaatggcaaggagtacaagtgcaaggtctccaacaaagccctcccagcccccatcgagaaaaccatctccaaagccaaagggcagccccgagaaccacaggtgtacaccctgcccccatcccgggaggagatgaccaagaaccaggtcagcctgacctgcctggtcaaaggcttctatcccagcgacatcgccgtggagtgggagagcaatgggcagccggagaacaactacaagaccacgcctcccgtgctggactccgacggctccttcttcctcaccagcaagctcaccgtggacaagagcaggtggcagcaggggaacgtcttctcatgctccgtgatgcatgaggctctgcacaaccactacacgcagaagagcctctccctgtctccgggtaaatga

SEQ ID NO: 129 - protein, 616 aa, Artificial Sequence
  Description of Artificial Sequence: Synthetic polypeptide
ASLPYLQKESVFQSGAHAYRIPALLYLPGQQSLLAFAEQRASKKDEHAELIVLRRGDYDAPTHQVQWQAQEVVAQARLDGHRSMNPCPLYDAQTGTLFLFFIAIPGQVTEQQQLQTRANVTRLCQVTSTDHGRTWSSPRDLTDAAIGPAYREWSTFAVGPGHCLQLHDRARSLVVPAYAYRKLHPKQRPIPSAFCFLSHDHGRTWARGHFVAQDTLECQVAEVETGEQRVVTLNARSHLRARVQAQSTNDGLDFQESQLVKKLVEPPPQGCQGSVISFPSPRSGPGSPAQWLLYTHPTHSWQRADLGAYLNPRPPAPEAWSEPVLLAKGSCAYSDLQSMGTGPDGSPLFGCLYEANDYEEIVFLMFTLKQAFPAEYLPQGGGGSGGGGSDKTHTCPPCPAPELLGGPSVFLFPPKPKDTLMISRTPEVTCVVVDVSHEDPEVKFNWYVDGVEVHNAKTKPREEQYNSTYRVVSVLTVLHQDWLNGKEYKCKVSNKALPAPIEKTISKAKGQPREPQVYTLPPSREEMTKNQVSLTCLVKGFYPSDIAVEWESNGQPENNYKTTPPVLDSDGSFFLYSKLTVDKSRWQQGNVFSCSVMHEALHNHYTQKSLSLSPGK

SEQ ID NO: 130 - protein, 616 aa, Artificial Sequence
  Description of Artificial Sequence: Synthetic polypeptide
ASLPYLQKESVFQSGAHAYRIPALLYLPGQQSLLAFAEQRASKKDEHAELIVLRRGDYDAPTHQVQWQAQEVVAQARLDGHRSMNPCPLYDAQTGTLFLFFIAIPGQVTEQQQLQTRANVTRLCQVTSTDHGRTWSSPRDLTDAAIGPAYREWSTFAVGPGHCLQLHDRARSLVVPAYAYRKLHPKQRPIPSAFCFLSHDHGRTWARGHFVAQDTLECQVAEVETGEQRVVTLNARSHLRARVQAQSTNDGLDFQESQLVKKLVEPPPQGCQGSVISFPSPRSGPGSPAQWLLYTHPTHSWQRADLGAYLNPRPPAPEAWSEPVLLAKGSAAYSDLQSMGTGPDGSPLFGCLYEANDYEEIVFLMFTLKQAFPAEYLPQGGGGSGGGGSDKTHTCPPCPAPELLGGPSVFLFPPKPKDTLMISRTPEVTCVVVDVSHEDPEVKFNWYVDGVEVHNAKTKPREEQYNSTYRVVSVLTVLHQDWLNGKEYKCKVSNKALPAPIEKTISKAKGQPREPQVYTLPPSREEMTKNQVSLTCLVKGFYPSDIAVEWESNGQPENNYKTTPPVLDSDGSFFLYSKLTVDKSRWQQGNVFSCSVMHEALHNHYTQKSLSLSPGK

SEQ ID NO: 131 - protein, 617 aa, Artificial Sequence
  Description of Artificial Sequence: Synthetic polypeptide
AASLPYLQKESVFQSGAHAYRIPALLYLPGQQSLLAFAEQRASKKDEHAELIVLRRGDYDAPTHQVQWQAQEVVAQARLDGHRSMNPCPLYDAQTGTLFLFFIAIPGQVTEQQQLQTRANVTRLCQVTSTDHGRTWSSPRDLTDAAIGPAYREWSTFAVGPGHCLQLHDRARSLVVPAYAYRKLHPKQRPIPSAFCFLSHDHGRTWARGHFVAQDTLECQVAEVETGEQRVVTLNARSHLRARVQAQSTNDGLDFQESQLVKKLVEPPPQGCQGSVISFPSPRSGPGSPAQWLLYTHPTHSWQRADLGAYLNPRPPAPEAWSEPVLLAKGSAAYSDLQSMGTGPDGSPLFGCLYEANDYEEIVFLMFTLKQAFPAEYLPQGGGGSGGGGSDKTHTCPPCPAPELLGGPSVFLFPPKPKDTLMISRTPEVTCVVVDVSHEDPEVKFNWYVDGVEVHNAKTKPREEQYNSTYRVVSVLTVLHQDWLNGKEYKCKVSNKALPAPIEKTISKAKGQPREPQVYTLPPSREEMTKNQVSLTCLVKGFYPSDIAVEWESNGQPENNYKTTPPVLDSDGSFFLYSKLTVDKSRWQQGNVFSCSVMHEALHNHYTQKSLSLSPGK

SEQ ID NO: 132 - protein, 617 aa, Artificial Sequence
  Description of Artificial Sequence: Synthetic polypeptide
DASLPYLQKESVFQSGAHAYRIPALLYLPGQQSLLAFAEQRASKKDEHAELIVLRRGDYDAPTHQVQWQAQEVVAQARLDGHRSMNPCPLYDAQTGTLFLFFIAIPGQVTEQQQLQTRANVTRLCQVTSTDHGRTWSSPRDLTDAAIGPAYREWSTFAVGPGHCLQLHDRARSLVVPAYAYRKLHPKQRPIPSAFCFLSHDHGRTWARGHFVAQDTLECQVAEVETGEQRVVTLNARSHLRARVQAQSTNDGLDFQESQLVKKLVEPPPQGCQGSVISFPSPRSGPGSPAQWLLYTHPTHSWQRADLGAYLNPRPPAPEAWSEPVLLAKGSAAYSDLQSMGTGPDGSPLFGCLYEANDYEEIVFLMFTLKQAFPAEYLPQGGGGSGGGGSDKTHTCPPCPAPELLGGPSVFLFPPKPKDTLMISRTPEVTCVVVDVSHEDPEVKFNWYVDGVEVHNAKTKPREEQYNSTYRVVSVLTVLHQDWLNGKEYKCKVSNKALPAPIEKTISKAKGQPREPQVYTLPPSREEMTKNQVSLTCLVKGFYPSDIAVEWESNGQPENNYKTTPPVLDSDGSFFLYSKLTVDKSRWQQGNVFSCSVMHEALHNHYTQKSLSLSPGK

SEQ ID NO: 133 - protein, 617 aa, Artificial Sequence
  Description of Artificial Sequence: Synthetic polypeptide
AASLPYLQKESVFQSGAHAYRIPALLYLPGQQSLLAFAEQRASKKDEHAELIVLRRGDYDAPTHQVQWQAQEVVAQARLDGHRSMNPCPLYDAQTGTLFLFFIAIPGQVTEQQQLQTRANVTRLCQVTSTDHGRTWSSPRDLTDAAIGPAYREWSTFAVGPGHCLQLHDRARSLVVPAYAYRKLHPKQRPIPSAFCFLSHDHGRTWARGHFVAQDTLECQVAEVETGEQRVVTLNARSHLRARVQAQSTNDGLDFQESQLVKKLVEPPPQGCQGSVISFPSPRSGPGSPAQWLLYTHPTHSWQRADLGAYLNPRPPAPEAWSEPVLLAKGSCAYSDLQSMGTGPDGSPLFGCLYEANDYEEIVFLMFTLKQAFPAEYLPQGGGGSGGGGSDKTHTCPPCPAPELLGGPSVFLFPPKPKDTLMISRTPEVTCVVVDVSHEDPEVKFNWYVDGVEVHNAKTKPREEQYNSTYRVVSVLTVLHQDWLNGKEYKCKVSNKALPAPIEKTISKAKGQPREPQVYTLPPSREEMTKNQVSLTCLVKGFYPSDIAVEWESNGQPENNYKTTPPVLDSDGSFFLYSKLTVDKSRWQQGNVFSCSVMHEALHNHYTQKSLSLSPGK

SEQ ID NO: 134 - protein, 617 aa, Artificial Sequence
  Description of Artificial Sequence: Synthetic polypeptide
DASLPYLQKESVFQSGAHAYRIPALLYLPGQQSLLAFAEQRASKKDEHAELIVLRRGDYDAPTHQVQWQAQEVVAQARLDGHRSMNPCPLYDAQTGTLFLFFIAIPGQVTEQQQLQTRANVTRLCQVTSTDHGRTWSSPRDLTDAAIGPAYREWSTFAVGPGHCLQLHDRARSLVVPAYAYRKLHPKQRPIPSAFCFLSHDHGRTWARGHFVAQDTLECQVAEVETGEQRVVTLNARSHLRARVQAQSTNDGLDFQESQLVKKLVEPPPQGCQGSVISFPSPRSGPGSPAQWLLYTHPTHSWQRADLGAYLNPRPPAPEAWSEPVLLAKGSCAYSDLQSMGTGPDGSPLFGCLYEANDYEEIVFLMFTLKQAFPAEYLPQGGGGSGGGGSDKTHTCPPCPAPELLGGPSVFLFPPKPKDTLMISRTPEVTCVVVDVSHEDPEVKFNWYVDGVEVHNAKTKPREEQYNSTYRVVSVLTVLHQDWLNGKEYKCKVSNKALPAPIEKTISKAKGQPREPQVYTLPPSREEMTKNQVSLTCLVKGFYPSDIAVEWESNGQPENNYKTTPPVLDSDGSFFLYSKLTVDKSRWQQGNVFSCSVMHEALHNHYTQKSLSLSPGK

SEQ ID NO: 135 - protein, 617 aa, Artificial Sequence
  Description of Artificial Sequence: Synthetic polypeptide
MASLPYLQKESVFQSGAHAYRIPALLYLPGQQSLLAFAEQRASKKDEHAELIVLRRGDYDAPTHQVQWQAQEVVAQARLDGHRSMNPCPLYDAQTGTLFLFFIAIPGQVTEQQQLQTRANVTRLCQVTSTDHGRTWSSPRDLTDAAIGPAYREWSTFAVGPGHCLQLHDRARSLVVPAYAYRKLHPKQRPIPSAFCFLSHDHGRTWARGHFVAQDTLECQVAEVETGEQRVVTLNARSHLRARVQAQSTNDGLDFQESQLVKKLVEPPPQGCQGSVISFPSPRSGPGSPAQWLLYTHPTHSWQRADLGAYLNPRPPAPEAWSEPVLLAKGSCAYSDLQSMGTGPDGSPLFGCLYEANDYEEIVFLMFTLKQAFPAEYLPQGGGGSGGGGSDKTHTCPPCPAPELLGGPSVFLFPPKPKDTLMISRTPEVTCVVVDVSHEDPEVKFNWYVDGVEVHNAKTKPREEQYNSTYRVVSVLTVLHQDWLNGKEYKCKVSNKALPAPIEKTISKAKGQPREPQVYTLPPSREEMTKNQVSLTCLVKGFYPSDIAVEWESNGQPENNYKTTPPVLDSDGSFFLYSKLTVDKSRWQQGNVFSCSVMHEALHNHYTQKSLSLSPGK

SEQ ID NO: 136 - protein, 617 aa, Artificial Sequence
  Description of Artificial Sequence: Synthetic polypeptide
MASLPYLQKESVFQSGAHAYRIPALLYLPGQQSLLAFAEQRASKKDEHAELIVLRRGDYDAPTHQVQWQAQEVVAQARLDGHRSMNPCPLYDAQTGTLFLFFIAIPGQVTEQQQLQTRANVTRLCQVTSTDHGRTWSSPRDLTDAAIGPAYREWSTFAVGPGHCLQLHDRARSLVVPAYAYRKLHPKQRPIPSAFCFLSHDHGRTWARGHFVAQDTLECQVAEVETGEQRVVTLNARSHLRARVQAQSTNDGLDFQESQLVKKLVEPPPQGCQGSVISFPSPRSGPGSPAQWLLYTHPTHSWQRADLGAYLNPRPPAPEAWSEPVLLAKGSAAYSDLQSMGTGPDGSPLFGCLYEANDYEEIVFLMFTLKQAFPAEYLPQGGGGSGGGGSDKTHTCPPCPAPELLGGPSVFLFPPKPKDTLMISRTPEVTCVVVDVSHEDPEVKFNWYVDGVEVHNAKTKPREEQYNSTYRVVSVLTVLHQDWLNGKEYKCKVSNKALPAPIEKTISKAKGQPREPQVYTLPPSREEMTKNQVSLTCLVKGFYPSDIAVEWESNGQPENNYKTTPPVLDSDGSFFLYSKLTVDKSRWQQGNVFSCSVMHEALHNHYTQKSLSLSPGK

SEQ ID NO: 137 - protein, 617 aa, Artificial Sequence
  Description of Artificial Sequence: Synthetic polypeptide
DASLPYLQKESVFQSGAHAYRIPALLYLPGQQSLLAFAEQRASKKDEHAELIVLRRGDYDAGTHQVQWQAQEVVAQARLDGHRSMNPCPLYDEQTGTLFLFFIAIPGQVTEQQQLQTRANVTRLCQVTSTDHGRTWSSPRDLTDAAIGPAYREWSTFAVGPGHCLQLHDRARSLVVPAYAYRKLHPKQRPIPSAFCFLSHDHGRTWARGHFVAQDTLECQVAEVETGEQRVVTLNARSHLRARVQAQSTNDGLDFQESQLVKKLVEPPPQGCQGSVISFPSPRSGPGSPAQWLLYTHPTHSWQRADLGAYLNPRPPAPEAWSEPVLLAKGSAAYSDLQSMGTGPDGSPLFGCLYEANDYEEIVFLMFTLKQAFPAEYLPQGGGGSGGGGSDKTHTCPPCPAPELLGGPSVFLFPPKPKDTLMISRTPEVTCVVVDVSHEDPEVKFNWYVDGVEVHNAKTKPREEQYNSTYRVVSVLTVLHQDWLNGKEYKCKVSNKALPAPIEKTISKAKGQPREPQVYTLPPSREEMTKNQVSLTCLVKGFYPSDIAVEWESNGQPENNYKTTPPVLDSDGSFFLYSKLTVDKSRWQQGNVFSCSVMHEALHNHYTQKSLSLSPGK

SEQ ID NO: 138 - protein, 617 aa, Artificial Sequence
  Description of Artificial Sequence: Synthetic polypeptide
DASLPYLQDESVFQSGAHAYRIPALLYLPGQQSLLAFAEQRASKKDEHAELIVLRRGDYDAPTHQVQWQAQEVVAQARLDGHRSMNPCPLYDEQTGTLFLFFIAIPGQVTEQQQLQTRANVTRLCQVTSTDHGRTWSSPRDLTDAAIGPAYREWSTFAVGPGHCLQLHDRARSLVVPAYAYRKLHPKQRPIPSAFCFLSHDHGRTWARGHFVAQDTLECQVAEVETGEQRVVTLNARSHLRARVQAQSTNDGLDFQESQLVKKLVEPPPQGCQGSVISFPSPRSGPGSPAQWLLYTHPTHSWQRADLGAYLNPRPPAPEAWSEPVLLAKGSAAYSDLQSMGTGPDGSPLFGCLYEANDYEEIRFIMFTLKQAFPAEYLPQGGGGSGGGGSDKTHTCPPCPAPELLGGPSVFLFPPKPKDTLMISRTPEVTCVVVDVSHEDPEVKFNWYVDGVEVHNAKTKPREEQYNSTYRVVSVLTVLHQDWLNGKEYKCKVSNKALPAPIEKTISKAKGQPREPQVYTLPPSREEMTKNQVSLTCLVKGFYPSDIAVEWESNGQPENNYKTTPPVLDSDGSFFLYSKLTVDKSRWQQGNVFSCSVMHEALHNHYTQKSLSLSPGK

SEQ ID NO: 139 - protein, 617 aa, Artificial Sequence
  Description of Artificial Sequence: Synthetic polypeptide
DASLPYLQKESVFQSGAHAYRIPALLYLPGQQSLLAFAEQRASKKDEHAELIVLRRGDYDANTHQVQWQAQEVVAQARLDGHRSMNPCPLYDAQTGTLFLFFIAIPGQVTEQQQLQTRANVTRLCQVTSTDHGRTWSSPRDLTDAAIGPAYREWSTFAVGPGHCLQLHDRARSLVVPAYAYRKLHPKQRPIPSAFCFLSHDHGRTWARGHFVAQDTLECQVAEVETGEQRVVTLNARSHLRARVQAQSTNDGLDFQESQLVKKLVEPPPQGCQGSVISFPSPRSGPGSPAQWLLYTHPTHSWQRADLGAYLNPRPPAPEAWSEPVLLAKGSAAYSDLQSMGTGPDGSPLFGCLYEANDYEEIVFLMFTLKQAFPAEYLPQGGGGSGGGGSDKTHTCPPCPAPELLGGPSVFLFPPKPKDTLMISRTPEVTCVVVDVSHEDPEVKFNWYVDGVEVHNAKTKPREEQYNSTYRVVSVLTVLHQDWLNGKEYKCKVSNKALPAPIEKTISKAKGQPREPQVYTLPPSREEMTKNQVSLTCLVKGFYPSDIAVEWESNGQPENNYKTTPPVLDSDGSFFLYSKLTVDKSRWQQGNVFSCSVMHEALHNHYTQKSLSLSPGK

SEQ ID NO: 140 - protein, 617 aa, Artificial Sequence
  Description of Artificial Sequence: Synthetic polypeptide
DASLPYLQKESVFQSGAHAYRIPALLYLPGQQSLLAFAEQRASKKDEHAELIVLRRGDYDAPTHQVQWQAQEVVAQARLDGHRSMNPCPLYDAQTGTLFLFFIAIPGQVTEQQQLQTRANVTRLCQVTSTDHGRTWSSPRDLTDAAIGPAYREWSTFAVGPGHCLQLHDRARSLVVPAYAYRKLHPKQRPIPSAFCFLSHDHGRTWARGHFVAQDTLECQVAEVETGEQRVVTLNARSHLRARVQAQSTNDGLDFQESQLVKKLVEPPPAGCQGSVISFPSPRSGPGSPAQWLLYTHPTHRKQRADLGAYLNPRPPAPEAWSEPVLLAKGSAAYSDLQSMGTGPDGSPLFGCLYEANDYEEIVFLMFTLKQAFPAEYLPQGGGGSGGGGSDKTHTCPPCPAPELLGGPSVFLFPPKPKDTLMISRTPEVTCVVVDVSHEDPEVKFNWYVDGVEVHNAKTKPREEQYNSTYRVVSVLTVLHQDWLNGKEYKCKVSNKALPAPIEKTISKAKGQPREPQVYTLPPSREEMTKNQVSLTCLVKGFYPSDIAVEWESNGQPENNYKTTPPVLDSDGSFFLYSKLTVDKSRWQQGNVFSCSVMHEALHNHYTQKSLSLSPGK

SEQ ID NO: 141 - protein, 617 aa, Artificial Sequence
  Description of Artificial Sequence: Synthetic polypeptide
DASLPYLQKESVFQSGAHAYRIPALLYLPGQQSLLAFAEQRASKKDEHAELIVLRRGDYDASTHQVQWQAQEVVAQARLDGHRSMNPCPLYDAQTGTLFLFFIAIPGQVTEQQQLQTRANVTRLCQVTSTDHGRTWSSPRDLTDAAIGPAYREWSTFAVGPGHCLQLHDRARSLVVPAYAYRKLHPKQRPIPSAFCFLSHDHGRTWARGHFVAQDTLECQVAEVETGEQRVVTLNARSHLRARVQAQSTNDGLDFQESQLVKKLVEPPPAGCQGSVISFPSPRSGPGSPAQWLLYTHPTHRKQRADLGAYLNPRPPAPEAWSEPVLLAKGSAAYSDLQSMGTGPDGSPLFGCLYEANDYEEIVFLMFTLKQAFPAEYLPQGGGGSGGGGSDKTHTCPPCPAPELLGGPSVFLFPPKPKDTLMISRTPEVTCVVVDVSHEDPEVKFNWYVDGVEVHNAKTKPREEQYNSTYRVVSVLTVLHQDWLNGKEYKCKVSNKALPAPIEKTISKAKGQPREPQVYTLPPSREEMTKNQVSLTCLVKGFYPSDIAVEWESNGQPENNYKTTPPVLDSDGSFFLYSKLTVDKSRWQQGNVFSCSVMHEALHNHYTQKSLSLSPGK

SEQ ID NO: 142 - protein, 617 aa, Artificial Sequence
  Description of Artificial Sequence: Synthetic polypeptide
DASLPYLQKESVFQSGAHAYRIPALLYLPGQQSLLAFAEQRASKKDEHAELIVLRRGDYDATTHQVQWQAQEVVAQARLDGHRSMNPCPLYDAQTGTLFLFFIAIPGQVTEQQQLQTRANVTRLCQVTSTDHGRTWSSPRDLTDAAIGPAYREWSTFAVGPGHCLQLHDRARSLVVPAYAYRKLHPKQRPIPSAFCFLSHDHGRTWARGHFVAQDTLECQVAEVETGEQRVVTLNARSHLRARVQAQSTNDGLDFQESQLVKKLVEPPPAGCQGSVISFPSPRSGPGSPAQWLLYTHPTHRKQRADLGAYLNPRPPAPEAWSEPVLLAKGSAAYSDLQSMGTGPDGSPLFGCLYEANDYEEIVFLMFTLKQAFPAEYLPQGGGGSGGGGSDKTHTCPPCPAPELLGGPSVFLFPPKPKDTLMISRTPEVTCVVVDVSHEDPEVKFNWYVDGVEVHNAKTKPREEQYNSTYRVVSVLTVLHQDWLNGKEYKCKVSNKALPAPIEKTISKAKGQPREPQVYTLPPSREEMTKNQVSLTCLVKGFYPSDIAVEWESNGQPENNYKTTPPVLDSDGSFFLYSKLTVDKSRWQQGNVFSCSVMHEALHNHYTQKSLSLSPGK

SEQ ID NO: 143 - protein, 617 aa, Artificial Sequence
  Description of Artificial Sequence: Synthetic polypeptide
DASLPYLQKESVFQSGAHAYRIPALLYLPGQQSLLAFAEQRASKKDEHAELIVLRRGDYDANTHQVQWQAQEVVAQARLDGHRSMNPCPLYDAQTGTLFLFFIAIPGQVTEQQQLQTRANVTRLCQVTSTDHGRTWSSPRDLTDAAIGPAYREWSTFAVGPGHCLQLHDRARSLVVPAYAYRKLHPKQRPIPSAFCFLSHDHGRTWARGHFVAQDTLECQVAEVETGEQRVVTLNARSHLRARVQAQSTNDGLDFQESQLVKKLVEPPPAGCQGSVISFPSPRSGPGSPAQWLLYTHPTHRKQRADLGAYLNPRPPAPEAWSEPVLLAKGSAAYSDLQSMGTGPDGSPLFGCLYEANDYEEIVFLMFTLKQAFPAEYLPQGGGGSGGGGSDKTHTCPPCPAPELLGGPSVFLFPPKPKDTLMISRTPEVTCVVVDVSHEDPEVKFNWYVDGVEVHNAKTKPREEQYNSTYRVVSVLTVLHQDWLNGKEYKCKVSNKALPAPIEKTISKAKGQPREPQVYTLPPSREEMTKNQVSLTCLVKGFYPSDIAVEWESNGQPENNYKTTPPVLDSDGSFFLYSKLTVDKSRWQQGNVFSCSVMHEALHNHYTQKSLSLSPGK

SEQ ID NO: 144 - protein, 611 aa, Artificial Sequence
  Description of Artificial Sequence: Synthetic polypeptide
ASLPYLQKESVFQSGAHAYRIPALLYLPGQQSLLAFAEQRASKKDEHAELIVLRRGDYDAPTHQVQWQAQEVVAQARLDGHRSMNPCPLYDAQTGTLFLFFIAIPGQVTEQQQLQTRANVTRLCQVTSTDHGRTWSSPRDLTDAAIGPAYREWSTFAVGPGHCLQLHDRARSLVVPAYAYRKLHPKQRPIPSAFCFLSHDHGRTWARGHFVAQDTLECQVAEVETGEQRVVTLNARSHLRARVQAQSTNDGLDFQESQLVKKLVEPPPQGCQGSVISFPSPRSGPGSPAQWLLYTHPTHSWQRADLGAYLNPRPPAPEAWSEPVLLAKGSCAYSDLQSMGTGPDGSPLFGCLYEANDYEEIVFLMFTLKQAFPAEYLPQEPKSSDKTHTCPPCPAPELLGGPSVFLFPPKPKDTLMISRTPEVTCVVVDVSHEDPEVKFNWYVDGVEVHNAKTKPREEQYNSTYRVVSVLTVLHQDWLNGKEYKCKVSNKALPAPIEKTISKAKGQPREPQVYTLPPSREEMTKNQVSLTCLVKGFYPSDIAVEWESNGQPENNYKTTPPVLDSDGSFFLYSKLTVDKSRWQQGNVFSCSVMHEALHNHYTQKSLSLSPGK

SEQ ID NO: 145 - protein, 611 aa, Artificial Sequence
  Description of Artificial Sequence: Synthetic polypeptide
ASLPYLQKESVFQSGAHAYRIPALLYLPGQQSLLAFAEQRASKKDEHAELIVLRRGDYDAPTHQVQWQAQEVVAQARLDGHRSMNPCPLYDAQTGTLFLFFIAIPGQVTEQQQLQTRANVTRLCQVTSTDHGRTWSSPRDLTDAAIGPAYREWSTFAVGPGHCLQLHDRARSLVVPAYAYRKLHPKQRPIPSAFCFLSHDHGRTWARGHFVAQDTLECQVAEVETGEQRVVTLNARSHLRARVQAQSTNDGLDFQESQLVKKLVEPPPQGCQGSVISFPSPRSGPGSPAQWLLYTHPTHSWQRADLGAYLNPRPPAPEAWSEPVLLAKGSAAYSDLQSMGTGPDGSPLFGCLYEANDYEEIVFLMFTLKQAFPAEYLPQEPKSSDKTHTCPPCPAPELLGGPSVFLFPPKPKDTLMISRTPEVTCVVVDVSHEDPEVKFNWYVDGVEVHNAKTKPREEQYNSTYRVVSVLTVLHQDWLNGKEYKCKVSNKALPAPIEKTISKAKGQPREPQVYTLPPSREEMTKNQVSLTCLVKGFYPSDIAVEWESNGQPENNYKTTPPVLDSDGSFFLYSKLTVDKSRWQQGNVFSCSVMHEALHNHYTQKSLSLSPGK

SEQ ID NO: 146 - protein, 612 aa, Artificial Sequence
  Description of Artificial Sequence: Synthetic polypeptide
AASLPYLQKESVFQSGAHAYRIPALLYLPGQQSLLAFAEQRASKKDEHAELIVLRRGDYDAPTHQVQWQAQEVVAQARLDGHRSMNPCPLYDAQTGTLFLFFIAIPGQVTEQQQLQTRANVTRLCQVTSTDHGRTWSSPRDLTDAAIGPAYREWSTFAVGPGHCLQLHDRARSLVVPAYAYRKLHPKQRPIPSAFCFLSHDHGRTWARGHFVAQDTLECQVAEVETGEQRVVTLNARSHLRARVQAQSTNDGLDFQESQLVKKLVEPPPQGCQGSVISFPSPRSGPGSPAQWLLYTHPTHSWQRADLGAYLNPRPPAPEAWSEPVLLAKGSAAYSDLQSMGTGPDGSPLFGCLYEANDYEEIVFLMFTLKQAFPAEYLPQEPKSSDKTHTCPPCPAPELLGGPSVFLFPPKPKDTLMISRTPEVTCVVVDVSHEDPEVKFNWYVDGVEVHNAKTKPREEQYNSTYRVVSVLTVLHQDWLNGKEYKCKVSNKALPAPIEKTISKAKGQPREPQVYTLPPSREEMTKNQVSLTCLVKGFYPSDIAVEWESNGQPENNYKTTPPVLDSDGSFFLYSKLTVDKSRWQQGNVFSCSVMHEALHNHYTQKSLSLSPGK

SEQ ID NO: 147 - protein, 612 aa, Artificial Sequence
  Description of Artificial Sequence: Synthetic polypeptide
DASLPYLQKESVFQSGAHAYRIPALLYLPGQQSLLAFAEQRASKKDEHAELIVLRRGDYDAPTHQVQWQAQEVVAQARLDGHRSMNPCPLYDAQTGTLFLFFIAIPGQVTEQQQLQTRANVTRLCQVTSTDHGRTWSSPRDLTDAAIGPAYREWSTFAVGPGHCLQLHDRARSLVVPAYAYRKLHPKQRPIPSAFCFLSHDHGRTWARGHFVAQDTLECQVAEVETGEQRVVTLNARSHLRARVQAQSTNDGLDFQESQLVKKLVEPPPQGCQGSVISFPSPRSGPGSPAQWLLYTHPTHSWQRADLGAYLNPRPPAPEAWSEPVLLAKGSAAYSDLQSMGTGPDGSPLFGCLYEANDYEEIVFLMFTLKQAFPAEYLPQEPKSSDKTHTCPPCPAPELLGGPSVFLFPPKPKDTLMISRTPEVTCVVVDVSHEDPEVKFNWYVDGVEVHNAKTKPREEQYNSTYRVVSVLTVLHQDWLNGKEYKCKVSNKALPAPIEKTISKAKGQPREPQVYTLPPSREEMTKNQVSLTCLVKGFYPSDIAVEWESNGQPENNYKTTPPVLDSDGSFFLYSKLTVDKSRWQQGNVFSCSVMHEALHNHYTQKSLSLSPGK

SEQ ID NO: 148 - protein, 612 aa, Artificial Sequence
  Description of Artificial Sequence: Synthetic polypeptide
AASLPYLQKESVFQSGAHAYRIPALLYLPGQQSLLAFAEQRASKKDEHAELIVLRRGDYDAPTHQVQWQAQEVVAQARLDGHRSMNPCPLYDAQTGTLFLFFIAIPGQVTEQQQLQTRANVTRLCQVTSTDHGRTWSSPRDLTDAAIGPAYREWSTFAVGPGHCLQLHDRARSLVVPAYAYRKLHPKQRPIPSAFCFLSHDHGRTWARGHFVAQDTLECQVAEVETGEQRVVTLNARSHLRARVQAQSTNDGLDFQESQLVKKLVEPPPQGCQGSVISFPSPRSGPGSPAQWLLYTHPTHSWQRADLGAYLNPRPPAPEAWSEPVLLAKGSCAYSDLQSMGTGPDGSPLFGCLYEANDYEEIVFLMFTLKQAFPAEYLPQEPKSSDKTHTCPPCPAPELLGGPSVFLFPPKPKDTLMISRTPEVTCVVVDVSHEDPEVKFNWYVDGVEVHNAKTKPREEQYNSTYRVVSVLTVLHQDWLNGKEYKCKVSNKALPAPIEKTISKAKGQPREPQVYTLPPSREEMTKNQVSLTCLVKGFYPSDIAVEWESNGQPENNYKTTPPVLDSDGSFFLYSKLTVDKSRWQQGNVFSCSVMHEALHNHYTQKSLSLSPGK

SEQ ID NO: 149 - protein, 612 aa, Artificial Sequence
  Description of Artificial Sequence: Synthetic polypeptide
DASLPYLQKESVFQSGAHAYRIPALLYLPGQQSLLAFAEQRASKKDEHAELIVLRRGDYDAPTHQVQWQAQEVVAQARLDGHRSMNPCPLYDAQTGTLFLFFIAIPGQVTEQQQLQTRANVTRLCQVTSTDHGRTWSSPRDLTDAAIGPAYREWSTFAVGPGHCLQLHDRARSLVVPAYAYRKLHPKQRPIPSAFCFLSHDHGRTWARGHFVAQDTLECQVAEVETGEQRVVTLNARSHLRARVQAQSTNDGLDFQESQLVKKLVEPPPQGCQGSVISFPSPRSGPGSPAQWLLYTHPTHSWQRADLGAYLNPRPPAPEAWSEPVLLAKGSCAYSDLQSMGTGPDGSPLFGCLYEANDYEEIVFLMFTLKQAFPAEYLPQEPKSSDKTHTCPPCPAPELLGGPSVFLFPPKPKDTLMISRTPEVTCVVVDVSHEDPEVKFNWYVDGVEVHNAKTKPREEQYNSTYRVVSVLTVLHQDWLNGKEYKCKVSNKALPAPIEKTISKAKGQPREPQVYTLPPSREEMTKNQVSLTCLVKGFYPSDIAVEWESNGQPENNYKTTPPVLDSDGSFFLYSKLTVDKSRWQQGNVFSCSVMHEALHNHYTQKSLSLSPGK

SEQ ID NO: 150 - protein, 612 aa, Artificial Sequence
  Description of Artificial Sequence: Synthetic polypeptide
MASLPYLQKESVFQSGAHAYRIPALLYLPGQQSLLAFAEQRASKKDEHAELIVLRRGDYDAPTHQVQWQAQEVVAQARLDGHRSMNPCPLYDAQTGTLFLFFIAIPGQVTEQQQLQTRANVTRLCQVTSTDHGRTWSSPRDLTDAAIGPAYREWSTFAVGPGHCLQLHDRARSLVVPAYAYRKLHPKQRPIPSAFCFLSHDHGRTWARGHFVAQDTLECQVAEVETGEQRVVTLNARSHLRARVQAQSTNDGLDFQESQLVKKLVEPPPQGCQGSVISFPSPRSGPGSPAQWLLYTHPTHSWQRADLGAYLNPRPPAPEAWSEPVLLAKGSCAYSDLQSMGTGPDGSPLFGCLYEANDYEEIVFLMFTLKQAFPAEYLPQEPKSSDKTHTCPPCPAPELLGGPSVFLFPPKPKDTLMISRTPEVTCVVVDVSHEDPEVKFNWYVDGVEVHNAKTKPREEQYNSTYRVVSVLTVLHQDWLNGKEYKCKVSNKALPAPIEKTISKAKGQPREPQVYTLPPSREEMTKNQVSLTCLVKGFYPSDIAVEWESNGQPENNYKTTPPVLDSDGSFFLYSKLTVDKSRWQQGNVFSCSVMHEALHNHYTQKSLSLSPGK

SEQ ID NO: 151 - protein, 612 aa, Artificial Sequence
  Description of Artificial Sequence: Synthetic polypeptide
MASLPYLQKESVFQSGAHAYRIPALLYLPGQQSLLAFAEQRASKKDEHAELIVLRRGDYDAPTHQVQWQAQEVVAQARLDGHRSMNPCPLYDAQTGTLFLFFIAIPGQVTEQQQLQTRANVTRLCQVTSTDHGRTWSSPRDLTDAAIGPAYREWSTFAVGPGHCLQLHDRARSLVVPAYAYRKLHPKQRPIPSAFCFLSHDHGRTWARGHFVAQDTLECQVAEVETGEQRVVTLNARSHLRARVQAQSTNDGLDFQESQLVKKLVEPPPQGCQGSVISFPSPRSGPGSPAQWLLYTHPTHSWQRADLGAYLNPRPPAPEAWSEPVLLAKGSAAYSDLQSMGTGPDGSPLFGCLYEANDYEEIVFLMFTLKQAFPAEYLPQEPKSSDKTHTCPPCPAPELLGGPSVFLFPPKPKDTLMISRTPEVTCVVVDVSHEDPEVKFNWYVDGVEVHNAKTKPREEQYNSTYRVVSVLTVLHQDWLNGKEYKCKVSNKALPAPIEKTISKAKGQPREPQVYTLPPSREEMTKNQVSLTCLVKGFYPSDIAVEWESNGQPENNYKTTPPVLDSDGSFFLYSKLTVDKSRWQQGNVFSCSVMHEALHNHYTQKSLSLSPGK

SEQ ID NO: 152 - protein, 612 aa, Artificial Sequence
  Description of Artificial Sequence: Synthetic polypeptide
DASLPYLQKESVFQSGAHAYRIPALLYLPGQQSLLAFAEQRASKKDEHAELIVLRRGDYDAGTHQVQWQAQEVVAQARLDGHRSMNPCPLYDEQTGTLFLFFIAIPGQVTEQQQLQTRANVTRLCQVTSTDHGRTWSSPRDLTDAAIGPAYREWSTFAVGPGHCLQLHDRARSLVVPAYAYRKLHPKQRPIPSAFCFLSHDHGRTWARGHFVAQDTLECQVAEVETGEQRVVTLNARSHLRARVQAQSTNDGLDFQESQLVKKLVEPPPQGCQGSVISFPSPRSGPGSPAQWLLYTHPTHSWQRADLGAYLNPRPPAPEAWSEPVLLAKGSAAYSDLQSMGTGPDGSPLFGCLYEANDYEEIVFLMFTLKQAFPAEYLPQEPKSSDKTHTCPPCPAPELLGGPSVFLFPPKPKDTLMISRTPEVTCVVVDVSHEDPEVKFNWYVDGVEVHNAKTKPREEQYNSTYRVVSVLTVLHQDWLNGKEYKCKVSNKALPAPIEKTISKAKGQPREPQVYTLPPSREEMTKNQVSLTCLVKGFYPSDIAVEWESNGQPENNYKTTPPVLDSDGSFFLYSKLTVDKSRWQQGNVFSCSVMHEALHNHYTQKSLSLSPGK

SEQ ID NO: 153 - protein, 612 aa, Artificial Sequence
  Description of Artificial Sequence: Synthetic polypeptide
DASLPYLQDESVFQSGAHAYRIPALLYLPGQQSLLAFAEQRASKKDEHAELIVLRRGDYDAPTHQVQWQAQEVVAQARLDGHRSMNPCPLYDEQTGTLFLFFIAIPGQVTEQQQLQTRANVTRLCQVTSTDHGRTWSSPRDLTDAAIGPAYREWSTFAVGPGHCLQLHDRARSLVVPAYAYRKLHPKQRPIPSAFCFLSHDHGRTWARGHFVAQDTLECQVAEVETGEQRVVTLNARSHLRARVQAQSTNDGLDFQESQLVKKLVEPPPQGCQGSVISFPSPRSGPGSPAQWLLYTHPTHSWQRADLGAYLNPRPPAPEAWSEPVLLAKGSAAYSDLQSMGTGPDGSPLFGCLYEANDYEEIRFIMFTLKQAFPAEYLPQEPKSSDKTHTCPPCPAPELLGGPSVFLFPPKPKDTLMISRTPEVTCVVVDVSHEDPEVKFNWYVDGVEVHNAKTKPREEQYNSTYRVVSVLTVLHQDWLNGKEYKCKVSNKALPAPIEKTISKAKGQPREPQVYTLPPSREEMTKNQVSLTCLVKGFYPSDIAVEWESNGQPENNYKTTPPVLDSDGSFFLYSKLTVDKSRWQQGNVFSCSVMHEALHNHYTQKSLSLSPGK

SEQ ID NO: 154 - protein, 612 aa, Artificial Sequence
  Description of Artificial Sequence: Synthetic polypeptide
DASLPYLQKESVFQSGAHAYRIPALLYLPGQQSLLAFAEQRASKKDEHAELIVLRRGDYDANTHQVQWQAQEVVAQARLDGHRSMNPCPLYDAQTGTLFLFFIAIPGQVTEQQQLQTRANVTRLCQVTSTDHGRTWSSPRDLTDAAIGPAYREWSTFAVGPGHCLQLHDRARSLVVPAYAYRKLHPKQRPIPSAFCFLSHDHGRTWARGHFVAQDTLECQVAEVETGEQRVVTLNARSHLRARVQAQSTNDGLDFQESQLVKKLVEPPPQGCQGSVISFPSPRSGPGSPAQWLLYTHPTHSWQRADLGAYLNPRPPAPEAWSEPVLLAKGSAAYSDLQSMGTGPDGSPLFGCLYEANDYEEIVFLMFTLKQAFPAEYLPQEPKSSDKTHTCPPCPAPELLGGPSVFLFPPKPKDTLMISRTPEVTCVVVDVSHEDPEVKFNWYVDGVEVHNAKTKPREEQYNSTYRVVSVLTVLHQDWLNGKEYKCKVSNKALPAPIEKTISKAKGQPREPQVYTLPPSREEMTKNQVSLTCLVKGFYPSDIAVEWESNGQPENNYKTTPPVLDSDGSFFLYSKLTVDKSRWQQGNVFSCSVMHEALHNHYTQKSLSLSPGK

SEQ ID NO: 155 - protein, 612 aa, Artificial Sequence
  Description of Artificial Sequence: Synthetic polypeptide
DASLPYLQKESVFQSGAHAYRIPALLYLPGQQSLLAFAEQRASKKDEHAELIVLRRGDYDAPTHQVQWQAQEVVAQARLDGHRSMNPCPLYDAQTGTLFLFFIAIPGQVTEQQQLQTRANVTRLCQVTSTDHGRTWSSPRDLTDAAIGPAYREWSTFAVGPGHCLQLHDRARSLVVPAYAYRKLHPKQRPIPSAFCFLSHDHGRTWARGHFVAQDTLECQVAEVETGEQRVVTLNARSHLRARVQAQSTNDGLDFQESQLVKKLVEPPPAGCQGSVISFPSPRSGPGSPAQWLLYTHPTHRKQRADLGAYLNPRPPAPEAWSEPVLLAKGSAAYSDLQSMGTGPDGSPLFGCLYEANDYEEIVFLMFTLKQAFPAEYLPQEPKSSDKTHTCPPCPAPELLGGPSVFLFPPKPKDTLMISRTPEVTCVVVDVSHEDPEVKFNWYVDGVEVHNAKTKPREEQYNSTYRVVSVLTVLHQDWLNGKEYKCKVSNKALPAPIEKTISKAKGQPREPQVYTLPPSREEMTKNQVSLTCLVKGFYPSDIAVEWESNGQPENNYKTTPPVLDSDGSFFLYSKLTVDKSRWQQGNVFSCSVMHEALHNHYTQKSLSLSPGK

SEQ ID NO: 156 - protein, 612 aa, Artificial Sequence
  Description of Artificial Sequence: Synthetic polypeptide
DASLPYLQKESVFQSGAHAYRIPALLYLPGQQSLLAFAEQRASKKDEHAELIVLRRGDYDASTHQVQWQAQEVVAQARLDGHRSMNPCPLYDAQTGTLFLFFIAIPGQVTEQQQLQTRANVTRLCQVTSTDHGRTWSSPRDLTDAAIGPAYREWSTFAVGPGHCLQLHDRARSLVVPAYAYRKLHPKQRPIPSAFCFLSHDHGRTWARGHFVAQDTLECQVAEVETGEQRVVTLNARSHLRARVQAQSTNDGLDFQESQLVKKLVEPPPAGCQGSVISFPSPRSGPGSPAQWLLYTHPTHRKQRADLGAYLNPRPPAPEAWSEPVLLAKGSAAYSDLQSMGTGPDGSPLFGCLYEANDYEEIVFLMFTLKQAFPAEYLPQEPKSSDKTHTCPPCPAPELLGGPSVFLFPPKPKDTLMISRTPEVTCVVVDVSHEDPEVKFNWYVDGVEVHNAKTKPREEQYNSTYRVVSVLTVLHQDWLNGKEYKCKVSNKALPAPIEKTISKAKGQPREPQVYTLPPSREEMTKNQVSLTCLVKGFYPSDIAVEWESNGQPENNYKTTPPVLDSDGSFFLYSKLTVDKSRWQQGNVFSCSVMHEALHNHYTQKSLSLSPGK

SEQ ID NO: 157 - protein, 612 aa, Artificial Sequence
  Description of Artificial Sequence: Synthetic polypeptide
DASLPYLQKESVFQSGAHAYRIPALLYLPGQQSLLAFAEQRASKKDEHAELIVLRRGDYDATTHQVQWQAQEVVAQARLDGHRSMNPCPLYDAQTGTLFLFFIAIPGQVTEQQQLQTRANVTRLCQVTSTDHGRTWSSPRDLTDAAIGPAYREWSTFAVGPGHCLQLHDRARSLVVPAYAYRKLHPKQRPIPSAFCFLSHDHGRTWARGHFVAQDTLECQVAEVETGEQRVVTLNARSHLRARVQAQSTNDGLDFQESQLVKKLVEPPPAGCQGSVISFPSPRSGPGSPAQWLLYTHPTHRKQRADLGAYLNPRPPAPEAWSEPVLLAKGSAAYSDLQSMGTGPDGSPLFGCLYEANDYEEIVFLMFTLKQAFPAEYLPQEPKSSDKTHTCPPCPAPELLGGPSVFLFPPKPKDTLMISRTPEVTCVVVDVSHEDPEVKFNWYVDGVEVHNAKTKPREEQYNSTYRVVSVLTVLHQDWLNGKEYKCKVSNKALPAPIEKTISKAKGQPREPQVYTLPPSREEMTKNQVSLTCLVKGFYPSDIAVEWESNGQPENNYKTTPPVLDSDGSFFLYSKLTVDKSRWQQGNVFSCSVMHEALHNHYTQKSLSLSPGK

SEQ ID NO: 158 - protein, 612 aa, Artificial Sequence
  Description of Artificial Sequence: Synthetic polypeptide
DASLPYLQKESVFQSGAHAYRIPALLYLPGQQSLLAFAEQRASKKDEHAELIVLRRGDYDANTHQVQWQAQEVVAQARLDGHRSMNPCPLYDAQTGTLFLFFIAIPGQVTEQQQLQTRANVTRLCQVTSTDHGRTWSSPRDLTDAAIGPAYREWSTFAVGPGHCLQLHDRARSLVVPAYAYRKLHPKQRPIPSAFCFLSHDHGRTWARGHFVAQDTLECQVAEVETGEQRVVTLNARSHLRARVQAQSTNDGLDFQESQLVKKLVEPPPAGCQGSVISFPSPRSGPGSPAQWLLYTHPTHRKQRADLGAYLNPRPPAPEAWSEPVLLAKGSAAYSDLQSMGTGPDGSPLFGCLYEANDYEEIVFLMFTLKQAFPAEYLPQEPKSSDKTHTCPPCPAPELLGGPSVFLFPPKPKDTLMISRTPEVTCVVVDVSHEDPEVKFNWYVDGVEVHNAKTKPREEQYNSTYRVVSVLTVLHQDWLNGKEYKCKVSNKALPAPIEKTISKAKGQPREPQVYTLPPSREEMTKNQVSLTCLVKGFYPSDIAVEWESNGQPENNYKTTPPVLDSDGSFFLYSKLTVDKSRWQQGNVFSCSVMHEALHNHYTQKSLSLSPGK

SEQ ID NO: 159 - protein, 617 aa, Artificial Sequence
  Description of Artificial Sequence: Synthetic polypeptide
  MOD_RES (1)..(1): Ala, Arg, Asn, Asp, Gln, Glu, Gly, His, Leu, Lys, Met, Phe, Thr, Val, or not present
  MOD_RES (2)..(2): Ala or Lys
  MOD_RES (4)..(4): Asn or Leu
  MOD_RES (5)..(5): Pro or His
  MOD_RES (6)..(6): Phe, Trp, Tyr or Val
  MOD_RES (9)..(9): Lys or Asp
  MOD_RES (44)..(44): Lys, Arg, or Glu
  MOD_RES (45)..(45): Lys, Ala, Arg, or Glu
  MOD_RES (54)..(54): Leu or Met
  MOD_RES (62)..(62): Pro, Asn, Asp, His, Glu, Gly, Ser or Thr
  MOD_RES (69)..(69): Gln or His
  MOD_RES (78)..(78): Arg or Lys
  MOD_RES (93)..(93): Ala, Glu or Lys
  MOD_RES (107)..(107): Gly or Asp
  MOD_RES (108)..(108): Gln or His
  MOD_RES (112)..(112): Gln, Arg, or Lys
  MOD_RES (125)..(125): Ala, Cys, Ile, Ser, Val, or Leu
  MOD_RES (126)..(126): Gln or Leu
  MOD_RES (150)..(150): Ala or Val
  MOD_RES (164)..(164): Cys or Gly
  MOD_RES (171)..(171): Ala or Gly
  MOD_RES (187)..(187): Arg, Ile, or Lys
  MOD_RES (196)..(196): Ala, Cys, Leu, or Val
  MOD_RES (217)..(217): Leu, Ala, or Val
  MOD_RES (249)..(249): Thr or Ala
  MOD_RES (251)..(251): Asp or Gly
  MOD_RES (257)..(257): Glu or Lys
  MOD_RES (270)..(270): Gln, Ala, His, Phe, or Pro
  MOD_RES (272)..(272): Cys or Val
  MOD_RES (292)..(292): Trp or Arg
  MOD_RES (301)..(301): Ser or Arg
  MOD_RES (302)..(302): Trp or Lys
  MOD_RES (325)..(325): Lys or Val
  MOD_RES (332)..(332): Ala, Cys, Ser, or Val
  MOD_RES (352)..(352): Cys, Leu, or Val
  MOD_RES (363)..(363): Val or Arg
  MOD_RES (365)..(365): Leu, Gln, His, Ile, Lys, or Ser
  See specification as filed for detailed description of substitutions and preferred embodiments
XXSXXXLQXESVFQSGAHAYRIPALLYLPGQQSLLAFAEQRASXXDEHAELIVXRRGDYDAXTHQVQWXAQEVVAQAXLDGHRSMNPCPLYDXQTGTLFLFFIAIPXXVTEXQQLQTRANVTRLXXVTSTDHGRTWSSPRDLTDAAIGPXYREWSTFAVGPGHXLQLHDRXRSLVVPAYAYRKLHPXQRPIPSAFXFLSHDHGRTWARGHFVAQDTXECQVAEVETGEQRVVTLNARSHLRARVQAQSXNXGLDFQXSQLVKKLVEPPPXGXQGSVISFPSPRSGPGSPAQXLLYTHPTHXXQRADLGAYLNPRPPAPEAWSEPXLLAKGSXAYSDLQSMGTGPDGSPLFGXLYEANDYEEIXFXMFTLKQAFPAEYLPQGGGGSGGGGSDKTHTCPPCPAPELLGGPSVFLFPPKPKDTLMISRTPEVTCVVVDVSHEDPEVKFNWYVDGVEVHNAKTKPREEQYNSTYRVVSVLTVLHQDWLNGKEYKCKVSNKALPAPIEKTISKAKGQPREPQVYTLPPSREEMTKNQVSLTCLVKGFYPSDIAVEWESNGQPENNYKTTPPVLDSDGSFFLTSKLTVDKSRWQQGNVFSCSVMHEALHNHYTQKSLSLSPGK

SEQ ID NO: 160 - protein, 617 aa, Artificial Sequence
  Description of Artificial Sequence: Synthetic polypeptide
  MOD_RES (1)..(1): Ala, Arg, Asn, Asp, Gln, Glu, Gly, His, Leu, Lys, Met, Phe, Thr, Val, or not present
  MOD_RES (6)..(6): Phe, Trp, Tyr or Val
  MOD_RES (9)..(9): Lys or Asp
  MOD_RES (62)..(62): Pro, Asn, Asp, His, Glu, Gly, Ser or Thr
  MOD_RES (93)..(93): Ala, Glu, or Lys
  MOD_RES (187)..(187): Arg, Ile, or Lys
  MOD_RES (270)..(270): Gln, Ala, His, Phe, or Pro
  MOD_RES (301)..(301): Ser or Arg
  MOD_RES (302)..(302): Trp or Lys
  MOD_RES (332)..(332): Ala, Cys, Ser, or Val
  MOD_RES (363)..(363): Val or Arg
  MOD_RES (365)..(365): Leu, Gln, His, Ile, Lys, or Ser
  See specification as filed for detailed description of substitutions and preferred embodiments
XASLPXLQXESVFQSGAHAYRIPALLYLPGQQSLLAFAEQRASKKDEHAELIVLRRGDYDAXTHQVQWQAQEVVAQARLDGHRSMNPCPLYDXQTGTLFLFFIAIPGQVTEQQQLQTRANVTRLCQVTSTDHGRTWSSPRDLTDAAIGPAYREWSTFAVGPGHCLQLHDRARSLVVPAYAYRKLHPXQRPIPSAFCFLSHDHGRTWARGHFVAQDTLECQVAEVETGEQRVVTLNARSHLRARVQAQSTNDGLDFQESQLVKKLVEPPPXGCQGSVISFPSPRSGPGSPAQWLLYTHPTHXXQRADLGAYLNPRPPAPEAWSEPVLLAKGSXAYSDLQSMGTGPDGSPLFGCLYEANDYEEIXFXMFTLKQAFPAEYLPQGGGGSGGGGSDKTHTCPPCPAPELLGGPSVFLFPPKPKDTLMISRTPEVTCVVVDVSHEDPEVKFNWYVDGVEVHNAKTKPREEQYNSTYRVVSVLTVLHQDWLNGKEYKCKVSNKALPAPIEKTISKAKGQPREPQVYTLPPSREEMTKNQVSLTCLVKGFYPSDIAVEWESNGQPENNYKTTPPVLDSDGSFFLTSKLTVDKSRWQQGNVFSCSVMHEALHNHYTQKSLSLSPGK

SEQ ID NO: 161 - protein, 617 aa, Artificial Sequence
  Description of Artificial Sequence: Synthetic polypeptide
  MOD_RES (1)..(1): Ala, Arg, Asn, Asp, Gln, Glu, Gly, His, Leu, Lys, Met, Phe, Thr, Val, or not present
  MOD_RES (2)..(2): Ala or Lys
  MOD_RES (4)..(4): Asn or Leu
  MOD_RES (5)..(5): Pro or His
  MOD_RES (6)..(6): Phe, Trp, Tyr or Val
  MOD_RES (9)..(9): Lys or Asp
  MOD_RES (44)..(44): Lys, Arg, or Glu
  MOD_RES (45)..(45): Lys, Ala, Arg, or Glu
  MOD_RES (54)..(54): Leu or Met
  MOD_RES (62)..(62): Pro, Asn, Asp, His, Glu, Gly, Ser or Thr
  MOD_RES (69)..(69): Gln or His
  MOD_RES (78)..(78): Arg or Lys
  MOD_RES (93)..(93): Ala, Glu or Lys
  MOD_RES (107)..(107): Gly or Asp
  MOD_RES (108)..(108): Gln or His
  MOD_RES (112)..(112): Gln, Arg, or Lys
  MOD_RES (125)..(125): Ala, Cys, Ile, Ser, Val, or Leu
  MOD_RES (126)..(126): Gln or Leu
  MOD_RES (150)..(150): Ala or Val
  MOD_RES (164)..(164): Cys or Gly
  MOD_RES (171)..(171): Ala or Gly
  MOD_RES (187)..(187): Arg, Ile, or Lys
  MOD_RES (196)..(196): Ala, Cys, Leu, or Val
  MOD_RES (217)..(217): Leu, Ala, or Val
  MOD_RES (249)..(249): Thr or Ala
  MOD_RES (251)..(251): Asp or Gly
  MOD_RES (257)..(257): Glu or Lys
  MOD_RES (270)..(270): Gln, Ala, His, Phe, or Pro
  MOD_RES (272)..(272): Cys or Val
  MOD_RES (292)..(292): Trp or Arg
  MOD_RES (301)..(301): Ser or Arg
  MOD_RES (302)..(302): Trp or Lys
  MOD_RES (325)..(325): Lys or Val
  MOD_RES (332)..(332): Ala, Cys, Ser, or Val
  MOD_RES (352)..(352): Cys, Leu, or Val
  MOD_RES (363)..(363): Val or Arg
  MOD_RES (365)..(365): Leu, Gln, His, Ile, Lys, or Ser
  MOD_RES (381)..(390): This region may encompass "GGGGSGGGGS" or "EPKSS"
  See specification as filed for detailed description of substitutions and preferred embodiments
XXSXXXLQXESVFQSGAHAYRIPALLYLPGQQSLLAFAEQRASXXDEHAELIVXRRGDYDAXTHQVQWXAQEVVAQAXLDGHRSMNPCPLYDXQTGTLFLFFIAIPXXVTEXQQLQTRANVTRLXXVTSTDHGRTWSSPRDLTDAAIGPXYREWSTFAVGPGHXLQLHDRXRSLVVPAYAYRKLHPXQRPIPSAFXFLSHDHGRTWARGHFVAQDTXECQVAEVETGEQRVVTLNARSHLRARVQAQSXNXGLDFQXSQLVKKLVEPPPXGXQGSVISFPSPRSGPGSPAQXLLYTHPTHXXQRADLGAYLNPRPPAPEAWSEPXLLAKGSXAYSDLQSMGTGPDGSPLFGXLYEANDYEEIXFXMFTLKQAFPAEYLPQXXXXXXXXXXDKTHTCPPCPAPELLGGPSVFLFPPKPKDTLMISRTPEVTCVVVDVSHEDPEVKFNWYVDGVEVHNAKTKPREEQYNSTYRVVSVLTVLHQDWLNGKEYKCKVSNKALPAPIEKTISKAKGQPREPQVYTLPPSREEMTKNQVSLTCLVKGFYPSDIAVEWESNGQPENNYKTTPPVLDSDGSFFLTSKLTVDKSRWQQGNVFSCSVMHEALHNHYTQKSLSLSPGK

SEQ ID NO: 162 - protein, 10 aa, Artificial Sequence
  Description of Artificial Sequence: Synthetic peptide
GGGGSGGGGS

SEQ ID NO: 163 - protein, 5 aa, Artificial Sequence
  Description of Artificial Sequence: Synthetic peptide
EPKSS

SEQ ID NO: 164 - protein, 617 aa, Artificial Sequence
  Description of Artificial Sequence: Synthetic polypeptide
  MOD_RES (1)..(1): Ala, Arg, Asn, Asp, Gln, Glu, Gly, His, Leu, Lys, Met, Phe, Thr, Val, or not present
  MOD_RES (6)..(6): Phe, Trp, Tyr or Val
  MOD_RES (9)..(9): Lys or Asp
  MOD_RES (62)..(62): Pro, Asn, Asp, His, Glu, Gly, Ser or Thr
  MOD_RES (93)..(93): Ala, Glu, or Lys
  MOD_RES (187)..(187): Arg, Ile, or Lys
  MOD_RES (270)..(270): Gln, Ala, His, Phe, or Pro
  MOD_RES (301)..(301): Ser or Arg
  MOD_RES (302)..(302): Trp or Lys
  MOD_RES (332)..(332): Ala, Cys, Ser, or Val
  MOD_RES (363)..(363): Val or Arg
  MOD_RES (365)..(365): Leu, Gln, His, Ile, Lys, or Ser
  MOD_RES (381)..(390): This region may encompass "GGGGSGGGGS"  or "EPKSS"
  See specification as filed for detailed description of substitutions and preferred embodiments
XASLPXLQXESVFQSGAHAYRIPALLYLPGQQSLLAFAEQRASKKDEHAELIVLRRGDYDAXTHQVQWQAQEVVAQARLDGHRSMNPCPLYDXQTGTLFLFFIAIPGQVTEQQQLQTRANVTRLCQVTSTDHGRTWSSPRDLTDAAIGPAYREWSTFAVGPGHCLQLHDRARSLVVPAYAYRKLHPXQRPIPSAFCFLSHDHGRTWARGHFVAQDTLECQVAEVETGEQRVVTLNARSHLRARVQAQSTNDGLDFQESQLVKKLVEPPPXGCQGSVISFPSPRSGPGSPAQWLLYTHPTHXXQRADLGAYLNPRPPAPEAWSEPVLLAKGSXAYSDLQSMGTGPDGSPLFGCLYEANDYEEIXFXMFTLKQAFPAEYLPQXXXXXXXXXXDKTHTCPPCPAPELLGGPSVFLFPPKPKDTLMISRTPEVTCVVVDVSHEDPEVKFNWYVDGVEVHNAKTKPREEQYNSTYRVVSVLTVLHQDWLNGKEYKCKVSNKALPAPIEKTISKAKGQPREPQVYTLPPSREEMTKNQVSLTCLVKGFYPSDIAVEWESNGQPENNYKTTPPVLDSDGSFFLTSKLTVDKSRWQQGNVFSCSVMHEALHNHYTQKSLSLSPGK

SEQ ID NO: 165 - protein, 617 aa, Artificial Sequence
  Description of Artificial Sequence: Synthetic polypeptide
  MOD_RES (1)..(1): Ala, Arg, Asn, Asp, Gln, Glu, Gly, His, Leu, Lys, Met, Phe, Thr, Val, or not present
  MOD_RES (2)..(2): Ala or Lys
  MOD_RES (4)..(4): Asn or Leu
  MOD_RES (5)..(5): Pro or His
  MOD_RES (6)..(6): Phe, Trp, Tyr or Val
  MOD_RES (9)..(9): Lys or Asp
  MOD_RES (44)..(44): Lys, Arg, or Glu
  MOD_RES (45)..(45): Lys, Ala, Arg, or Glu
  MOD_RES (54)..(54): Leu or Met
  MOD_RES (62)..(62): Pro, Asn, Asp, His, Glu, Gly, Ser or Thr
  MOD_RES (69)..(69): Gln or His
  MOD_RES (78)..(78): Arg or Lys
  MOD_RES (80)..(80): Asp or Pro
  MOD_RES (93)..(93): Ala, Glu or Lys
  MOD_RES (107)..(107): Gly or Asp
  MOD_RES (108)..(108): Gln or His
  MOD_RES (112)..(112): Gln, Arg, or Lys
  MOD_RES (125)..(125): Ala, Cys, Ile, Ser, Val, or Leu
  MOD_RES (126)..(126): Gln, Leu, Glu, Phe, His, Ile, Leu, or Tyr
  MOD_RES (150)..(150): Ala or Val
  MOD_RES (164)..(164): Cys or Gly
  MOD_RES (170)..(170): Arg or Pro
  MOD_RES (171)..(171): Ala or Gly
  MOD_RES (187)..(187): Arg, Ile, or Lys
  MOD_RES (188)..(188): Gln or Pro
  MOD_RES (189)..(189): Arg or Pro
  MOD_RES (196)..(196): Ala, Cys, Leu, or Val
  MOD_RES (213)..(213): Ala, Cys, Asn, Ser, or Thr
  MOD_RES (217)..(217): Leu, Ala, or Val
  MOD_RES (225)..(225): Glu or Pro
  MOD_RES (239)..(239): His or Pro
  MOD_RES (240)..(240): Leu, Asp, Asn, or Tyr
  MOD_RES (241)..(241): Arg, Ala, Asp, Leu, Gln, or Tyr
  MOD_RES (242)..(242): Ala, Cys, Phe, Gly, His, Ile, Lys, Leu, Met, Asn, Gln, Arg, Ser, Val, Trp, or Tyr
  MOD_RES (244)..(244): Val, Ile, or Lys
  MOD_RES (249)..(249): Thr or Ala
  MOD_RES (251)..(251): Asp or Gly
  MOD_RES (257)..(257): Glu, Lys, or Pro
  MOD_RES (258)..(258): Ser or Cys
  MOD_RES (260)..(260): Leu, Asp, Phe, Gln, or Thr
  MOD_RES (265)..(265): Val or Phe
  MOD_RES (270)..(270): Gln, Ala, His, Phe, Pro, Ser, or Thr
  MOD_RES (272)..(272): Cys or Val
  MOD_RES (292)..(292): Trp or Arg
  MOD_RES (301)..(301): Ser, Arg, Ala, Asp, Glu, Phe, Gly, His, Ile, Lys, Leu, Met, Asn, Pro, Gln, Thr, Val, Trp, or Tyr
  MOD_RES (302)..(302): Trp, Lys, Ala, Asp, Glu, Phe, Gly, His, Ile, Lys, Leu, Met, Asn, Pro, Gln, Arg, Ser, Thr, Val, or Tyr
  MOD_RES (325)..(325): Lys or Val
  MOD_RES (332)..(332): Ala, Cys, Ser, or Val
  MOD_RES (352)..(352): Cys, Leu, or Val
  MOD_RES (363)..(363): Val or Arg
  MOD_RES (365)..(365): Leu, Gln, His, Ile, Lys, or Ser
  MOD_RES (381)..(390): This region may encompass "GGGGS", "GGGGSGGGGS", or "EPKSS"
  See specification as filed for detailed description of substitutions and preferred embodiments
XXSXXXLQXESVFQSGAHAYRIPALLYLPGQQSLLAFAEQRASXXDEHAELIVXRRGDYDAXTHQVQWXAQEVVAQAXLXGHRSMNPCPLYDXQTGTLFLFFIAIPXXVTEXQQLQTRANVTRLXXVTSTDHGRTWSSPRDLTDAAIGPXYREWSTFAVGPGHXLQLHDXXRSLVVPAYAYRKLHPXXXPIPSAFXFLSHDHGRTWARGHFVXQDTXECQVAEVXTGEQRVVTLNARSXXXXRXQAQSXNXGLDFQXXQXVKKLXEPPPXGXQGSVISFPSPRSGPGSPAQXLLYTHPTHXXQRADLGAYLNPRPPAPEAWSEPXLLAKGSXAYSDLQSMGTGPDGSPLFGXLYEANDYEEIXFXMFTLKQAFPAEYLPQXXXXXXXXXXDKTHTCPPCPAPELLGGPSVFLFPPKPKDTLMISRTPEVTCVVVDVSHEDPEVKFNWYVDGVEVHNAKTKPREEQYNSTYRVVSVLTVLHQDWLNGKEYKCKVSNKALPAPIEKTISKAKGQPREPQVYTLPPSREEMTKNQVSLTCLVKGFYPSDIAVEWESNGQPENNYKTTPPVLDSDGSFFLTSKLTVDKSRWQQGNVFSCSVMHEALHNHYTQKSLSLSPGK

SEQ ID NO: 166 - protein, 617 aa, Artificial Sequence
  Description of Artificial Sequence: Synthetic polypeptide
  MOD_RES (1)..(1): Ala, Arg, Asn, Asp, Gln, Glu, Gly, His, Leu, Lys, Met, Phe, Thr, Val, or not present
  MOD_RES (6)..(6): Phe, Trp, Tyr or Val
  MOD_RES (9)..(9): Lys or Asp
  MOD_RES (62)..(62): Pro, Asn, Asp, His, Glu, Gly, Ser or Thr
  MOD_RES (93)..(93): Ala, Glu, or Lys
  MOD_RES (126)..(126): Gln, Leu, Glu, Phe, His, Ile, Leu, or Tyr
  MOD_RES (187)..(187): Arg, Ile, or Lys
  MOD_RES (242)..(242): Ala, Cys, Phe, Gly, His, Ile, Lys, Leu, Met, Asn, Gln, Arg, Ser, Val, Trp, or Tyr
  MOD_RES (270)..(270): Gln, Ala, His, Phe, Pro, Ser, or Thr
  MOD_RES (301)..(301): Ser, Arg, Ala, Asp, Glu, Phe, Gly, His, Ile, Lys, Leu, Met, Asn, Pro, Gln, Thr, Val, Trp, or Tyr
  MOD_RES (302)..(302): Trp, Lys, Ala, Asp, Glu, Phe, Gly, His, Ile, Lys, Leu, Met, Asn, Pro, Gln, Arg, Ser, Thr, Val, or Tyr
  MOD_RES (332)..(332): Ala, Cys, Ser, or Val
  MOD_RES (363)..(363): Val or Arg
  MOD_RES (365)..(365): Leu, Gln, His, Ile, Lys, or Ser
  MOD_RES (381)..(390): This region may encompass "GGGGS", "GGGGSGGGGS", or "EPKSS"
  See specification as filed for detailed description of substitutions and preferred embodiments
XASLPXLQXESVFQSGAHAYRIPALLYLPGQQSLLAFAEQRASKKDEHAELIVLRRGDYDAXTHQVQWQAQEVVAQARLDGHRSMNPCPLYDXQTGTLFLFFIAIPGQVTEQQQLQTRANVTRLCXVTSTDHGRTWSSPRDLTDAAIGPAYREWSTFAVGPGHCLQLHDRARSLVVPAYAYRKLHPXQRPIPSAFCFLSHDHGRTWARGHFVAQDTLECQVAEVETGEQRVVTLNARSHLRXRVQAQSTNDGLDFQESQLVKKLVEPPPXGCQGSVISFPSPRSGPGSPAQWLLYTHPTHXXQRADLGAYLNPRPPAPEAWSEPVLLAKGSXAYSDLQSMGTGPDGSPLFGCLYEANDYEEIXFXMFTLKQAFPAEYLPQXXXXXXXXXXDKTHTCPPCPAPELLGGPSVFLFPPKPKDTLMISRTPEVTCVVVDVSHEDPEVKFNWYVDGVEVHNAKTKPREEQYNSTYRVVSVLTVLHQDWLNGKEYKCKVSNKALPAPIEKTISKAKGQPREPQVYTLPPSREEMTKNQVSLTCLVKGFYPSDIAVEWESNGQPENNYKTTPPVLDSDGSFFLTSKLTVDKSRWQQGNVFSCSVMHEALHNHYTQKSLSLSPGK

SEQ ID NO: 167 - protein, 232 aa, Artificial Sequence
  Description of Artificial Sequence: Synthetic polypeptide
EPKSCDKTHTCPPCPAPELLGGPSVFLFPPKPKDTLMISRTPEVTCVVVDVSHEDPEVKFNWYVDGVEVHNAKTKPREEQYNSTYRVVSVLTVLHQDWLNGKEYKCKVSNKALPAPIEKTISKAKGQPREPQVYTLPPSREEMTKNQVSLTCLVKGFYPSDIAVEWESNGQPENNYKTTPPVLDSDGSFFLTSKLTVDKSRWQQGNVFSCSVMHEALHNHYTQKSLSLSPGK

SEQ ID NO: 168 - protein, 227 aa, Artificial Sequence
  Description of Artificial Sequence: Synthetic polypeptide
DKTHTCPPCPAPELLGGPSVFLFPPKPKDTLMISRTPEVTCVVVDVSHEDPEVKFNWYVDGVEVHNAKTKPREEQYNSTYRVVSVLTVLHQDWLNGKEYKCKVSNKALPAPIEKTISKAKGQPREPQVYTLPPSREEMTKNQVSLYCLVKGFYPSDIAVEWESNGQPENNYKTTPPVLDSDGSFFLYSKLTVDKSRWQQGNVFSCSVMHEALHNHYTQKSLSLSPGK

SEQ ID NO: 169 - protein, 380 aa, Artificial Sequence
  Description of Artificial Sequence: Synthetic polypeptide
DASLPYLQKESVFQSGAHAYRIPALLYLPGQQSLLAFAEQRASKKDEHAELIVLRRGDYDAGTHQVQWQAQEVVAQARLDGHRSMNPCPLYDEQTGTLFLFFIAIPGQVTEQQQLQTRANVTRLCQVTSTDHGRTWSSPRDLTDAAIGPAYREWSTFAVGPGHCLQLHDRARSLVVPAYAYRKLHPKQRPIPSAFCFLSHDHGRTWARGHFVAQDTLECQVAEVETGEQRVVTLNARSHLRARVQAQSTNDGLDFQESQLVKKLVEPPPQGCQGSVISFPSPRSGPGSPAQWLLYTHPTHARQRADLGAYLNPRPPAPEAWSEPVLLAKGSAAYSDLQSMGTGPDGSPLFGCLYEANDYEEIVFLMFTLKQAFPAEYLPQ

SEQ ID NO: 170 - protein, 380 aa, Artificial Sequence
  Description of Artificial Sequence: Synthetic polypeptide
DASLPYLQKESVFQSGAHAYRIPALLYLPGQQSLLAFAEQRASKKDEHAELIVLRRGDYDAGTHQVQWQAQEVVAQARLDGHRSMNPCPLYDEQTGTLFLFFIAIPGQVTEQQQLQTRANVTRLCYVTSTDHGRTWSSPRDLTDAAIGPAYREWSTFAVGPGHCLQLHDRARSLVVPAYAYRKLHPKQRPIPSAFCFLSHDHGRTWARGHFVAQDTLECQVAEVETGEQRVVTLNARSHLRARVQAQSTNDGLDFQESQLVKKLVEPPPTGCQGSVISFPSPRSGPGSPAQWLLYTHPTHSWQRADLGAYLNPRPPAPEAWSEPVLLAKGSAAYSDLQSMGTGPDGSPLFGCLYEANDYEEIVFLMFTLKQAFPAEYLPQ

SEQ ID NO: 171 - protein, 380 aa, Artificial Sequence
  Description of Artificial Sequence: Synthetic polypeptide
DASLPYLQKESVFQSGAHAYRIPALLYLPGQQSLLAFAEQRASKKDEHAELIVLRRGDYDAGTHQVQWQAQEVVAQARLDGHRSMNPCPLYDEQTGTLFLFFIAIPGQVTEQQQLQTRANVTRLCYVTSTDHGRTWSSPRDLTDAAIGPAYREWSTFAVGPGHCLQLHDRARSLVVPAYAYRKLHPKQRPIPSAFCFLSHDHGRTWARGHFVAQDTLECQVAEVETGEQRVVTLNARSHLRFRVQAQSTNDGLDFQESQLVKKLVEPPPTGCQGSVISFPSPRSGPGSPAQWLLYTHPTHSWQRADLGAYLNPRPPAPEAWSEPVLLAKGSAAYSDLQSMGTGPDGSPLFGCLYEANDYEEIVFLMFTLKQAFPAEYLPQ

SEQ ID NO: 172 - protein, 380 aa, Artificial Sequence
  Description of Artificial Sequence: Synthetic polypeptide
  MOD_RES (1)..(1): Ala, Arg, Asn, Asp, Gln, Glu, Gly, His, Leu, Lys, Met, Phe, Thr, Val, or not present
  MOD_RES (2)..(2): Ala or Lys
  MOD_RES (4)..(4): Asn or Leu
  MOD_RES (5)..(5): Pro or His
  MOD_RES (6)..(6): Phe, Trp, Tyr or Val
  MOD_RES (9)..(9): Lys or Asp
  MOD_RES (44)..(44): Lys, Arg, or Glu
  MOD_RES (45)..(45): Lys, Ala, Arg, or Glu
  MOD_RES (54)..(54): Leu or Met
  MOD_RES (62)..(62): Pro, Asn, Asp, His, Glu, Gly, Ser or Thr
  MOD_RES (69)..(69): Gln or His
  MOD_RES (78)..(78): Arg or Lys
  MOD_RES (80)..(80): Asp or Pro
  MOD_RES (93)..(93): Ala, Glu or Lys
  MOD_RES (107)..(107): Gly or Asp
  MOD_RES (108)..(108): Gln or His
  MOD_RES (112)..(112): Gln, Arg, or Lys
  MOD_RES (125)..(125): Ala, Cys, Ile, Ser, Val, or Leu
  MOD_RES (126)..(126): Gln, Leu, Glu, Phe, His, Ile, Leu, or Tyr
  MOD_RES (150)..(150): Ala or Val
  MOD_RES (164)..(164): Cys or Gly
  MOD_RES (170)..(170): Arg or Pro
  MOD_RES (171)..(171): Ala or Gly
  MOD_RES (187)..(187): Arg, Ile, or Lys
  MOD_RES (188)..(188): Gln or Pro
  MOD_RES (189)..(189): Arg or Pro
  MOD_RES (196)..(196): Ala, Cys, Leu, or Val
  MOD_RES (213)..(213): Ala, Cys, Asn, Ser, or Thr
  MOD_RES (217)..(217): Leu, Ala, or Val
  MOD_RES (225)..(225): Glu or Pro
  MOD_RES (239)..(239): His or Pro
  MOD_RES (240)..(240): Leu, Asp, Asn, or Tyr
  MOD_RES (241)..(241): Arg, Ala, Asp, Leu, Gln, or Tyr
  MOD_RES (242)..(242): Ala, Cys, Phe, Gly, His, Ile, Lys, Leu, Met, Asn, Gln, Arg, Ser, Val, Trp, or Tyr
  MOD_RES (244)..(244): Val, Ile, or Lys
  MOD_RES (249)..(249): Thr or Ala
  MOD_RES (251)..(251): Asp or Gly
  MOD_RES (257)..(257): Glu, Lys, or Pro
  MOD_RES (258)..(258): Ser or Cys
  MOD_RES (260)..(260): Leu, Asp, Phe, Gln, or Thr
  MOD_RES (265)..(265): Val or Phe
  MOD_RES (270)..(270): Gln, Ala, His, Phe, Pro, Ser, or Thr
  MOD_RES (272)..(272): Cys or Val
  MOD_RES (292)..(292): Trp or Arg
  MOD_RES (301)..(301): Ser, Arg, Ala, Asp, Glu, Phe, Gly, His, Ile, Lys, Leu, Met, Asn, Pro, Gln, Thr, Val, Trp, or Tyr
  MOD_RES (302)..(302): Trp, Lys, Ala, Asp, Glu, Phe, Gly, His, Ile, Lys, Leu, Met, Asn, Pro, Gln, Arg, Ser, Thr, Val, or Tyr
  MOD_RES (325)..(325): Lys or Val
  MOD_RES (332)..(332): Ala, Cys, Ser, or Val
  MOD_RES (352)..(352): Cys, Leu, or Val
  MOD_RES (363)..(363): Val or Arg
  MOD_RES (365)..(365): Leu, Gln, His, Ile, Lys, or Ser
  See specification as filed for detailed description of substitutions and preferred embodiments
XXSXXXLQXESVFQSGAHAYRIPALLYLPGQQSLLAFAEQRASXXDEHAELIVXRRGDYDAXTHQVQWXAQEVVAQAXLXGHRSMNPCPLYDXQTGTLFLFFIAIPXXVTEXQQLQTRANVTRLXXVTSTDHGRTWSSPRDLTDAAIGPXYREWSTFAVGPGHXLQLHDXXRSLVVPAYAYRKLHPXXXPIPSAFXFLSHDHGRTWARGHFVXQDTXECQVAEVXTGEQRVVTLNARSXXXXRXQAQSXNXGLDFQXXQXVKKLXEPPPXGXQGSVISFPSPRSGPGSPAQXLLYTHPTHXXQRADLGAYLNPRPPAPEAWSEPXLLAKGSXAYSDLQSMGTGPDGSPLFGXLYEANDYEEIXFXMFTLKQAFPAEYLPQ

SEQ ID NO: 173 - protein, 380 aa, Artificial Sequence
  Description of Artificial Sequence: Synthetic polypeptide
  MOD_RES (1)..(1): Ala, Arg, Asn, Asp, Gln, Glu, Gly, His, Leu, Lys, Met, Phe, Thr, Val, or not present
  MOD_RES (6)..(6): Phe, Trp, Tyr or Val
  MOD_RES (9)..(9): Lys or Asp
  MOD_RES (62)..(62): Pro, Asn, Asp, His, Glu, Gly, Ser or Thr
  MOD_RES (93)..(93): Ala, Glu, or Lys
  MOD_RES (126)..(126): Gln, Leu, Glu, Phe, His, Ile, Leu, or Tyr
  MOD_RES (187)..(187): Arg, Ile, or Lys
  MOD_RES (242)..(242): Ala, Cys, Phe, Gly, His, Ile, Lys, Leu, Met, Asn, Gln, Arg, Ser, Val, Trp, or Tyr
  MOD_RES (270)..(270): Gln, Ala, His, Phe, Pro, Ser, or Thr
  MOD_RES (301)..(301): Ser, Arg, Ala, Asp, Glu, Phe, Gly, His, Ile, Lys, Leu, Met, Asn, Pro, Gln, Thr, Val, Trp, or Tyr
  MOD_RES (302)..(302): Trp, Lys, Ala, Asp, Glu, Phe, Gly, His, Ile, Lys, Leu, Met, Asn, Pro, Gln, Arg, Ser, Thr, Val, or Tyr
  MOD_RES (332)..(332): Ala, Cys, Ser, or Val
  MOD_RES (363)..(363): Val or Arg
  MOD_RES (365)..(365): Leu, Gln, His, Ile, Lys, or Ser
  See specification as filed for detailed description of substitutions and preferred embodiments
XASLPXLQXESVFQSGAHAYRIPALLYLPGQQSLLAFAEQRASKKDEHAELIVLRRGDYDAXTHQVQWQAQEVVAQARLDGHRSMNPCPLYDXQTGTLFLFFIAIPGQVTEQQQLQTRANVTRLCXVTSTDHGRTWSSPRDLTDAAIGPAYREWSTFAVGPGHCLQLHDRARSLVVPAYAYRKLHPXQRPIPSAFCFLSHDHGRTWARGHFVAQDTLECQVAEVETGEQRVVTLNARSHLRXRVQAQSTNDGLDFQESQLVKKLVEPPPXGCQGSVISFPSPRSGPGSPAQWLLYTHPTHXXQRADLGAYLNPRPPAPEAWSEPVLLAKGSXAYSDLQSMGTGPDGSPLFGCLYEANDYEEIXFXMFTLKQAFPAEYLPQ

SEQ ID NO: 174 - protein, 5 aa, Artificial Sequence
  Description of Artificial Sequence: Synthetic peptide
GGGGS

SEQ ID NO: 175 - protein, 617 aa, Artificial Sequence
  Description of Artificial Sequence: Synthetic polypeptide
DASLPYLQDESVFQSGAHAYRIPALLYLPGQQSLLAFAEQRASKKDEHAELIVLRRGDYDAPTHQVQWQAQEVVAQARLDGHRSMNPCPLYDEQTGTLFLFFIAIPGQVTEQQQLQTRANVTRLCQVTSTDHGRTWSSPRDLTDAAIGPAYREWSTFAVGPGHCLQLHDRARSLVVPAYAYRKLHPKQRPIPSAFCFLSHDHGRTWARGHFVAQDTLANQVAEVETGEQRVVTLNARSHLRARVQAQSTNDGLDFQESQLVKKLVEPPPQGCQGSVISFPSPRSGPGSPAQWLLYTHPTHSWQRADLGAYLNPRPPAPEAWSEPVLLAKGSAAYSDLQSMGTGPDGSPLFGCLYEANDYEEIRFRMFTLKQAFPAEYLPQGGGGSGGGGSDKTHTCPPCPAPELLGGPSVFLFPPKPKDTLMISRTPEVTCVVVDVSHEDPEVKFNWYVDGVEVHNAKTKPREEQYNSTYRVVSVLTVLHQDWLNGKEYKCKVSNKALPAPIEKTISKAKGQPREPQVYTLPPSREEMTKNQVSLTCLVKGFYPSDIAVEWESNGQPENNYKTTPPVLDSDGSFFLTSKLTVDKSRWQQGNVFSCSVMHEALHNHYTQKSLSLSPGK

SEQ ID NO: 176 - DNA, 1851 bp, Artificial Sequence
  Description of Artificial Sequence: Synthetic polynucleotide
gatgcatctctgccttacctgcaggatgaaagcgtgttccagtctggcgcccacgcctacagaattcccgctctgctgtatctgccaggccagcagtctctgctggctttcgctgaacagcgggccagcaagaaggatgagcacgccgaactgatcgtgctgcggagaggcgattacgacgcccctacacatcaggtgcagtggcaggctcaagaggtggtggctcaggctagactggacggccacagatctatgaacccctgtcctctgtacgatgaacagaccggcacactgtttctgttctttatcgctatccccggccaagtgaccgagcagcagcagctgcagacaagagccaacgtgaccagactgtgtcaagtgacctccaccgaccacggcagaacctggtctagccctagagatctgaccgacgccgccatcggacctgcctatagagagtggtccaccttcgccgttggacctggacactgtctccagctgcacgacagggctagatctctggtggtgcctgcctacgcctatagaaagctgcaccccaaacagcggcctattcctagcgccttctgctttctgagccacgatcacggcaggacatgggccagaggacatttcgtggcccaggacacactggcgaatcaggtggccgaagtggaaaccggcgagcagagagtcgtgaccctgaacgccagatctcacctgagagccagagtgcaggcccagagcacaaacgacggcctggatttccaagagagccagctggtcaagaaactggtggaacctcctccacagggctgtcagggaagcgtgatcagctttccatctcctagaagcggccctggctctcctgctcagtggctgctgtatacacaccccacacacagctggcagagagccgatctgggcgcctacctgaatcctagacctcctgctcctgaggcttggagcgaacctgttctgctggccaagggcagcgctgcctacagcgatctgcagtctatgggcacaggccctgatggcagccctctgtttggctgtctgtacgaggccaacgactacgaagagatccgtttccgtatgttcaccctgaagcaggcctttccagccgagtacctgcctcaaggcggaggtggaagtggcggaggcggatccgacaaaactcacacatgcccaccgtgcccagcacctgaactcctggggggaccgtcagtcttcctcttccccccaaaacccaaggacaccctcatgatctcccggacccctgaggtcacatgcgtggtggtggacgtgagccacgaagaccctgaggtcaagttcaactggtacgtggacggcgtggaggtgcataatgccaagacaaagccgcgggaggagcagtacaacagcacgtaccgtgtggtcagcgtcctcaccgtcctgcaccaggactggctgaatggcaaggagtacaagtgcaaggtctccaacaaagccctcccagcccccatcgagaaaaccatctccaaagccaaagggcagccccgagaaccacaggtctacaccctgcccccatcccgggaggagatgaccaagaaccaggtcagcctgacctgcctggtcaaaggcttctatcccagcgacatcgccgtggagtgggagagcaatgggcagccggagaacaactacaagaccacgcctcccgtgctggactccgacggctccttcttcctcactagcaagctcaccgtggacaagagcaggtggcagcaggggaacgtcttctcatgctccgtgatgcatgaggctctgcacaaccactacacgcagaagagcctctccctgtctccgggtaaa

SEQ ID NO: 177 - protein, 617 aa, Artificial Sequence
  Description of Artificial Sequence: Synthetic polypeptide
DASLPYLQKESVFQSGAHAYRIPALLYLPGQQSLLAFAEQRASKKDEHAELIVLRRGDYDAGTHQVQWQAQEVVAQARLDGHRSMNPCPLYDEQTGTLFLFFIAIPGQVTEQQQLQTRANVTRLCQVTSTDHGRTWSSPRDLTDAAIGPAYREWSTFAVGPGHCLQLHDRARSLVVPAYAYRKLHPKQRPIPSAFCFLSHDHGRTWARGHFVAQDTLECQVAEVETGEQRVVTLNARSHLRARVQAQSTNDGLDFQESQLVKKLVEPPPQGCQGSVISFPSPRSGPGSPAQWLLYTHPTHARQRADLGAYLNPRPPAPEAWSEPVLLAKGSAAYSDLQSMGTGPDGSPLFGCLYEANDYEEIVFLMFTLKQAFPAEYLPQGGGGSGGGGSDKTHTCPPCPAPELLGGPSVFLFPPKPKDTLMISRTPEVTCVVVDVSHEDPEVKFNWYVDGVEVHNAKTKPREEQYNSTYRVVSVLTVLHQDWLNGKEYKCKVSNKALPAPIEKTISKAKGQPREPQVYTLPPSREEMTKNQVSLTCLVKGFYPSDIAVEWESNGQPENNYKTTPPVLDSDGSFFLTSKLTVDKSRWQQGNVFSCSVMHEALHNHYTQKSLSLSPGK

SEQ ID NO: 178 - protein, 612 aa, Artificial Sequence
  Description of Artificial Sequence: Synthetic polypeptide
DASLPYLQKESVFQSGAHAYRIPALLYLPGQQSLLAFAEQRASKKDEHAELIVLRRGDYDAGTHQVQWQAQEVVAQARLDGHRSMNPCPLYDEQTGTLFLFFIAIPGQVTEQQQLQTRANVTRLCQVTSTDHGRTWSSPRDLTDAAIGPAYREWSTFAVGPGHCLQLHDRARSLVVPAYAYRKLHPKQRPIPSAFCFLSHDHGRTWARGHFVAQDTLECQVAEVETGEQRVVTLNARSHLRARVQAQSTNDGLDFQESQLVKKLVEPPPQGCQGSVISFPSPRSGPGSPAQWLLYTHPTHARQRADLGAYLNPRPPAPEAWSEPVLLAKGSAAYSDLQSMGTGPDGSPLFGCLYEANDYEEIVFLMFTLKQAFPAEYLPQEPKSSDKTHTCPPCPAPELLGGPSVFLFPPKPKDTLMISRTPEVTCVVVDVSHEDPEVKFNWYVDGVEVHNAKTKPREEQYNSTYRVVSVLTVLHQDWLNGKEYKCKVSNKALPAPIEKTISKAKGQPREPQVYTLPPSREEMTKNQVSLTCLVKGFYPSDIAVEWESNGQPENNYKTTPPVLDSDGSFFLTSKLTVDKSRWQQGNVFSCSVMHEALHNHYTQKSLSLSPGK

SEQ ID NO: 179 - protein, 617 aa, Artificial Sequence
  Description of Artificial Sequence: Synthetic polypeptide
DASLPYLQKESVFQSGAHAYRIPALLYLPGQQSLLAFAEQRASKKDEHAELIVLRRGDYDAGTHQVQWQAQEVVAQARLDGHRSMNPCPLYDEQTGTLFLFFIAIPGQVTEQQQLQTRANVTRLCQVTSTDHGRTWSSPRDLTDAAIGPAYREWSTFAVGPGHCLQLHDRARSLVVPAYAYRKLHPKQRPIPSAFCFLSHDHGRTWARGHFVAQDTLECQVAEVETGEQRVVTLNARSHLRARVQAQSTNDGLDFQESQLVKKLVEPPPQGCQGSVISFPSPRSGPGSPAQWLLYTHPTHARQRADLGAYLNPRPPAPEAWSEPVLLAKGSAAYSDLQSMGTGPDGSPLFGCLYEANDYEEIVFLMFTLKQAFPAEYLPQGGGGSGGGGSDKTHTCPPCPAPELLGGPSVFLFPPKPKDTLMISRTPEVTCVVVDVSHEDPEVKFNWYVDGVEVHNAKTKPREEQYNSTYRVVSVLTVLHQDWLNGKEYKCKVSNKALPAPIEKTISKAKGQPREPQVYTLPPSREEMTKNQVSLTCLVKGFYPSDIAVEWESNGQPENNYKTTPPVLDSDGSFFLYSKLTVDKSRWQQGNVFSCSVMHEALHNHYTQKSLSLSPGK

SEQ ID NO: 180 - protein, 612 aa, Artificial Sequence
  Description of Artificial Sequence: Synthetic polypeptide
DASLPYLQKESVFQSGAHAYRIPALLYLPGQQSLLAFAEQRASKKDEHAELIVLRRGDYDAGTHQVQWQAQEVVAQARLDGHRSMNPCPLYDEQTGTLFLFFIAIPGQVTEQQQLQTRANVTRLCQVTSTDHGRTWSSPRDLTDAAIGPAYREWSTFAVGPGHCLQLHDRARSLVVPAYAYRKLHPKQRPIPSAFCFLSHDHGRTWARGHFVAQDTLECQVAEVETGEQRVVTLNARSHLRARVQAQSTNDGLDFQESQLVKKLVEPPPQGCQGSVISFPSPRSGPGSPAQWLLYTHPTHARQRADLGAYLNPRPPAPEAWSEPVLLAKGSAAYSDLQSMGTGPDGSPLFGCLYEANDYEEIVFLMFTLKQAFPAEYLPQEPKSSDKTHTCPPCPAPELLGGPSVFLFPPKPKDTLMISRTPEVTCVVVDVSHEDPEVKFNWYVDGVEVHNAKTKPREEQYNSTYRVVSVLTVLHQDWLNGKEYKCKVSNKALPAPIEKTISKAKGQPREPQVYTLPPSREEMTKNQVSLTCLVKGFYPSDIAVEWESNGQPENNYKTTPPVLDSDGSFFLYSKLTVDKSRWQQGNVFSCSVMHEALHNHYTQKSLSLSPGK

SEQ ID NO: 181 - protein, 617 aa, Artificial Sequence
  Description of Artificial Sequence: Synthetic polypeptide
DASLPYLQKESVFQSGAHAYRIPALLYLPGQQSLLAFAEQRASKKDEHAELIVLRRGDYDAGTHQVQWQAQEVVAQARLDGHRSMNPCPLYDEQTGTLFLFFIAIPGQVTEQQQLQTRANVTRLCYVTSTDHGRTWSSPRDLTDAAIGPAYREWSTFAVGPGHCLQLHDRARSLVVPAYAYRKLHPKQRPIPSAFCFLSHDHGRTWARGHFVAQDTLECQVAEVETGEQRVVTLNARSHLRARVQAQSTNDGLDFQESQLVKKLVEPPPTGCQGSVISFPSPRSGPGSPAQWLLYTHPTHSWQRADLGAYLNPRPPAPEAWSEPVLLAKGSAAYSDLQSMGTGPDGSPLFGCLYEANDYEEIVFLMFTLKQAFPAEYLPQGGGGSGGGGSDKTHTCPPCPAPELLGGPSVFLFPPKPKDTLMISRTPEVTCVVVDVSHEDPEVKFNWYVDGVEVHNAKTKPREEQYNSTYRVVSVLTVLHQDWLNGKEYKCKVSNKALPAPIEKTISKAKGQPREPQVYTLPPSREEMTKNQVSLTCLVKGFYPSDIAVEWESNGQPENNYKTTPPVLDSDGSFFLTSKLTVDKSRWQQGNVFSCSVMHEALHNHYTQKSLSLSPGK

SEQ ID NO: 182 - protein, 612 aa, Artificial Sequence
  Description of Artificial Sequence: Synthetic polypeptide
DASLPYLQKESVFQSGAHAYRIPALLYLPGQQSLLAFAEQRASKKDEHAELIVLRRGDYDAGTHQVQWQAQEVVAQARLDGHRSMNPCPLYDEQTGTLFLFFIAIPGQVTEQQQLQTRANVTRLCYVTSTDHGRTWSSPRDLTDAAIGPAYREWSTFAVGPGHCLQLHDRARSLVVPAYAYRKLHPKQRPIPSAFCFLSHDHGRTWARGHFVAQDTLECQVAEVETGEQRVVTLNARSHLRARVQAQSTNDGLDFQESQLVKKLVEPPPTGCQGSVISFPSPRSGPGSPAQWLLYTHPTHSWQRADLGAYLNPRPPAPEAWSEPVLLAKGSAAYSDLQSMGTGPDGSPLFGCLYEANDYEEIVFLMFTLKQAFPAEYLPQEPKSSDKTHTCPPCPAPELLGGPSVFLFPPKPKDTLMISRTPEVTCVVVDVSHEDPEVKFNWYVDGVEVHNAKTKPREEQYNSTYRVVSVLTVLHQDWLNGKEYKCKVSNKALPAPIEKTISKAKGQPREPQVYTLPPSREEMTKNQVSLTCLVKGFYPSDIAVEWESNGQPENNYKTTPPVLDSDGSFFLTSKLTVDKSRWQQGNVFSCSVMHEALHNHYTQKSLSLSPGK

SEQ ID NO: 183 - protein, 617 aa, Artificial Sequence
  Description of Artificial Sequence: Synthetic polypeptide
DASLPYLQKESVFQSGAHAYRIPALLYLPGQQSLLAFAEQRASKKDEHAELIVLRRGDYDAGTHQVQWQAQEVVAQARLDGHRSMNPCPLYDEQTGTLFLFFIAIPGQVTEQQQLQTRANVTRLCYVTSTDHGRTWSSPRDLTDAAIGPAYREWSTFAVGPGHCLQLHDRARSLVVPAYAYRKLHPKQRPIPSAFCFLSHDHGRTWARGHFVAQDTLECQVAEVETGEQRVVTLNARSHLRARVQAQSTNDGLDFQESQLVKKLVEPPPTGCQGSVISFPSPRSGPGSPAQWLLYTHPTHSWQRADLGAYLNPRPPAPEAWSEPVLLAKGSAAYSDLQSMGTGPDGSPLFGCLYEANDYEEIVFLMFTLKQAFPAEYLPQGGGGSGGGGSDKTHTCPPCPAPELLGGPSVFLFPPKPKDTLMISRTPEVTCVVVDVSHEDPEVKFNWYVDGVEVHNAKTKPREEQYNSTYRVVSVLTVLHQDWLNGKEYKCKVSNKALPAPIEKTISKAKGQPREPQVYTLPPSREEMTKNQVSLTCLVKGFYPSDIAVEWESNGQPENNYKTTPPVLDSDGSFFLYSKLTVDKSRWQQGNVFSCSVMHEALHNHYTQKSLSLSPGK

SEQ ID NO: 184 - protein, 612 aa, Artificial Sequence
  Description of Artificial Sequence: Synthetic polypeptide
DASLPYLQKESVFQSGAHAYRIPALLYLPGQQSLLAFAEQRASKKDEHAELIVLRRGDYDAGTHQVQWQAQEVVAQARLDGHRSMNPCPLYDEQTGTLFLFFIAIPGQVTEQQQLQTRANVTRLCYVTSTDHGRTWSSPRDLTDAAIGPAYREWSTFAVGPGHCLQLHDRARSLVVPAYAYRKLHPKQRPIPSAFCFLSHDHGRTWARGHFVAQDTLECQVAEVETGEQRVVTLNARSHLRARVQAQSTNDGLDFQESQLVKKLVEPPPTGCQGSVISFPSPRSGPGSPAQWLLYTHPTHSWQRADLGAYLNPRPPAPEAWSEPVLLAKGSAAYSDLQSMGTGPDGSPLFGCLYEANDYEEIVFLMFTLKQAFPAEYLPQEPKSSDKTHTCPPCPAPELLGGPSVFLFPPKPKDTLMISRTPEVTCVVVDVSHEDPEVKFNWYVDGVEVHNAKTKPREEQYNSTYRVVSVLTVLHQDWLNGKEYKCKVSNKALPAPIEKTISKAKGQPREPQVYTLPPSREEMTKNQVSLTCLVKGFYPSDIAVEWESNGQPENNYKTTPPVLDSDGSFFLYSKLTVDKSRWQQGNVFSCSVMHEALHNHYTQKSLSLSPGK

SEQ ID NO: 185 - protein, 617 aa, Artificial Sequence
  Description of Artificial Sequence: Synthetic polypeptide
DASLPYLQKESVFQSGAHAYRIPALLYLPGQQSLLAFAEQRASKKDEHAELIVLRRGDYDAGTHQVQWQAQEVVAQARLDGHRSMNPCPLYDEQTGTLFLFFIAIPGQVTEQQQLQTRANVTRLCYVTSTDHGRTWSSPRDLTDAAIGPAYREWSTFAVGPGHCLQLHDRARSLVVPAYAYRKLHPKQRPIPSAFCFLSHDHGRTWARGHFVAQDTLECQVAEVETGEQRVVTLNARSHLRFRVQAQSTNDGLDFQESQLVKKLVEPPPTGCQGSVISFPSPRSGPGSPAQWLLYTHPTHSWQRADLGAYLNPRPPAPEAWSEPVLLAKGSAAYSDLQSMGTGPDGSPLFGCLYEANDYEEIVFLMFTLKQAFPAEYLPQGGGGSGGGGSDKTHTCPPCPAPELLGGPSVFLFPPKPKDTLMISRTPEVTCVVVDVSHEDPEVKFNWYVDGVEVHNAKTKPREEQYNSTYRVVSVLTVLHQDWLNGKEYKCKVSNKALPAPIEKTISKAKGQPREPQVYTLPPSREEMTKNQVSLTCLVKGFYPSDIAVEWESNGQPENNYKTTPPVLDSDGSFFLTSKLTVDKSRWQQGNVFSCSVMHEALHNHYTQKSLSLSPGK

SEQ ID NO: 186 - protein, 612 aa, Artificial Sequence
  Description of Artificial Sequence: Synthetic polypeptide
DASLPYLQKESVFQSGAHAYRIPALLYLPGQQSLLAFAEQRASKKDEHAELIVLRRGDYDAGTHQVQWQAQEVVAQARLDGHRSMNPCPLYDEQTGTLFLFFIAIPGQVTEQQQLQTRANVTRLCYVTSTDHGRTWSSPRDLTDAAIGPAYREWSTFAVGPGHCLQLHDRARSLVVPAYAYRKLHPKQRPIPSAFCFLSHDHGRTWARGHFVAQDTLECQVAEVETGEQRVVTLNARSHLRFRVQAQSTNDGLDFQESQLVKKLVEPPPTGCQGSVISFPSPRSGPGSPAQWLLYTHPTHSWQRADLGAYLNPRPPAPEAWSEPVLLAKGSAAYSDLQSMGTGPDGSPLFGCLYEANDYEEIVFLMFTLKQAFPAEYLPQEPKSSDKTHTCPPCPAPELLGGPSVFLFPPKPKDTLMISRTPEVTCVVVDVSHEDPEVKFNWYVDGVEVHNAKTKPREEQYNSTYRVVSVLTVLHQDWLNGKEYKCKVSNKALPAPIEKTISKAKGQPREPQVYTLPPSREEMTKNQVSLTCLVKGFYPSDIAVEWESNGQPENNYKTTPPVLDSDGSFFLTSKLTVDKSRWQQGNVFSCSVMHEALHNHYTQKSLSLSPGK

SEQ ID NO: 187 - protein, 617 aa, Artificial Sequence
  Description of Artificial Sequence: Synthetic polypeptide
DASLPYLQKESVFQSGAHAYRIPALLYLPGQQSLLAFAEQRASKKDEHAELIVLRRGDYDAGTHQVQWQAQEVVAQARLDGHRSMNPCPLYDEQTGTLFLFFIAIPGQVTEQQQLQTRANVTRLCYVTSTDHGRTWSSPRDLTDAAIGPAYREWSTFAVGPGHCLQLHDRARSLVVPAYAYRKLHPKQRPIPSAFCFLSHDHGRTWARGHFVAQDTLECQVAEVETGEQRVVTLNARSHLRFRVQAQSTNDGLDFQESQLVKKLVEPPPTGCQGSVISFPSPRSGPGSPAQWLLYTHPTHSWQRADLGAYLNPRPPAPEAWSEPVLLAKGSAAYSDLQSMGTGPDGSPLFGCLYEANDYEEIVFLMFTLKQAFPAEYLPQGGGGSGGGGSDKTHTCPPCPAPELLGGPSVFLFPPKPKDTLMISRTPEVTCVVVDVSHEDPEVKFNWYVDGVEVHNAKTKPREEQYNSTYRVVSVLTVLHQDWLNGKEYKCKVSNKALPAPIEKTISKAKGQPREPQVYTLPPSREEMTKNQVSLTCLVKGFYPSDIAVEWESNGQPENNYKTTPPVLDSDGSFFLYSKLTVDKSRWQQGNVFSCSVMHEALHNHYTQKSLSLSPGK

SEQ ID NO: 188 - protein, 612 aa, Artificial Sequence
  Description of Artificial Sequence: Synthetic polypeptide
DASLPYLQKESVFQSGAHAYRIPALLYLPGQQSLLAFAEQRASKKDEHAELIVLRRGDYDAGTHQVQWQAQEVVAQARLDGHRSMNPCPLYDEQTGTLFLFFIAIPGQVTEQQQLQTRANVTRLCYVTSTDHGRTWSSPRDLTDAAIGPAYREWSTFAVGPGHCLQLHDRARSLVVPAYAYRKLHPKQRPIPSAFCFLSHDHGRTWARGHFVAQDTLECQVAEVETGEQRVVTLNARSHLRFRVQAQSTNDGLDFQESQLVKKLVEPPPTGCQGSVISFPSPRSGPGSPAQWLLYTHPTHSWQRADLGAYLNPRPPAPEAWSEPVLLAKGSAAYSDLQSMGTGPDGSPLFGCLYEANDYEEIVFLMFTLKQAFPAEYLPQEPKSSDKTHTCPPCPAPELLGGPSVFLFPPKPKDTLMISRTPEVTCVVVDVSHEDPEVKFNWYVDGVEVHNAKTKPREEQYNSTYRVVSVLTVLHQDWLNGKEYKCKVSNKALPAPIEKTISKAKGQPREPQVYTLPPSREEMTKNQVSLTCLVKGFYPSDIAVEWESNGQPENNYKTTPPVLDSDGSFFLYSKLTVDKSRWQQGNVFSCSVMHEALHNHYTQKSLSLSPGK

SEQ ID NO: 189 - protein, 612 aa, Artificial Sequence
  Description of Artificial Sequence: Synthetic polypeptide
DASLPYLQKESVFQSGAHAYRIPALLYLPGQQSLLAFAEQRASKKDEHAELIVLRRGDYDAGTHQVQWQAQEVVAQARLDGHRSMNPCPLYDEQTGTLFLFFIAIPGQVTEQQQLQTRANVTRLCYVTSTDHGRTWSSPRDLTDAAIGPAYREWSTFAVGPGHCLQLHDRARSLVVPAYAYRKLHPKQRPIPSAFCFLSHDHGRTWARGHFVAQDTLECQVAEVETGEQRVVTLNARSHLRARVQAQSTNDGLDFQESQLVKKLVEPPPTGCQGSVISFPSPRSGPGSPAQWLLYTHPTHSWQRADLGAYLNPRPPAPEAWSEPVLLAKGSAAYSDLQSMGTGPDGSPLFGCLYEANDYEEIVFLMFTLKQAFPAEYLPQEPKSSDKTHTCPPCPAPELLGGPSVFLFPPKPKDTLMISRTPEVTCVVVDVSHEDPEVKFNWYVDGVEVHNAKTKPREEQYNSTYRVVSVLTVLHQDWLNGKEYKCKVSNKALPAPIEKTISKAKGQPREPQVYTLPPSREEMTKNQVSLYCLVKGFYPSDIAVEWESNGQPENNYKTTPPVLDSDGSFFLYSKLTVDKSRWQQGNVFSCSVMHEALHNHYTQKSLSLSPGK

SEQ ID NO: 190 - DNA, 1836 bp, Artificial Sequence
  Description of Artificial Sequence: Synthetic polynucleotide
gatgcatctctgccttacctgcagaaagaaagcgtgttccagtctggcgcccacgcctacagaattcccgctctgctgtatctgccaggccagcagtctctgctggctttcgctgaacagcgggccagcaagaaggatgagcacgccgaactgatcgtgctgcggagaggcgattacgacgccggcacacatcaggtgcagtggcaggctcaagaggtggtggctcaggctagactggacggccacagatctatgaacccctgtcctctgtacgatgaacagaccggcacactgtttctgttctttatcgctatccccggccaagtgaccgagcagcagcagctgcagacaagagccaacgtgaccagactgtgttacgtgacctccaccgaccacggcagaacctggtctagccctagagatctgaccgacgccgccatcggacctgcctatagagagtggtccaccttcgccgttggacctggacactgtctccagctgcacgacagggctagatctctggtggtgcctgcctacgcctatagaaagctgcaccccaaacagcggcctattcctagcgccttctgctttctgagccacgatcacggcaggacatgggccagaggacatttcgtggcccaggacacactggaatgccaggtggccgaagtggaaaccggcgagcagagagtcgtgaccctgaacgccagatctcacctgagagccagagtgcaggcccagagcacaaacgacggcctggatttccaagagagccagctggtcaagaaactggtggaacctcctccaaccggctgtcagggaagcgtgatcagctttccatctcctagaagcggccctggctctcctgctcagtggctgctgtatacacaccccacacacagctggcagagagccgatctgggcgcctacctgaatcctagacctcctgctcctgaggcttggagcgaacctgttctgctggccaagggcagcgctgcctacagcgatctgcagtctatgggcacaggccctgatggcagccctctgtttggctgtctgtacgaggccaacgactacgaagagatcgtgttcctgatgttcaccctgaagcaggcctttccagccgagtacctgcctcaagagcccaaatcttctgacaaaactcacacatgcccaccgtgcccagcacctgaactcctggggggaccgtcagtcttcctcttccccccaaaacccaaggacaccctcatgatctcccggacccctgaggtcacatgcgtggtggtggacgtgagccacgaagaccctgaggtcaagttcaactggtacgtggacggcgtggaggtgcataatgccaagacaaagccgcgggaggagcagtacaacagcacgtaccgtgtggtcagcgtcctcaccgtcctgcaccaggactggctgaatggcaaggagtacaagtgcaaggtctccaacaaagccctcccagcccccatcgagaaaaccatctccaaagccaaagggcagccccgagaaccacaggtctacaccctgcccccatcccgggaggagatgaccaagaaccaggtcagcctgtactgcctggtcaaaggcttctatcccagcgacatcgccgtggagtgggagagcaatgggcagccggagaacaactacaagaccacgcctcccgtgctggactccgacggctccttcttcctctatagcaagctcaccgtggacaagagcaggtggcagcaggggaacgtcttctcatgctccgtgatgcatgaggctctgcacaaccactacacgcagaagagcctctccctgtctccgggtaaa

SEQ ID NO: 191 - protein, 612 aa, Artificial Sequence
  Description of Artificial Sequence: Synthetic polypeptide
DASLPYLQKESVFQSGAHAYRIPALLYLPGQQSLLAFAEQRASKKDEHAELIVLRRGDYDAGTHQVQWQAQEVVAQARLDGHRSMNPCPLYDEQTGTLFLFFIAIPGQVTEQQQLQTRANVTRLCYVTSTDHGRTWSSPRDLTDAAIGPAYREWSTFAVGPGHCLQLHDRARSLVVPAYAYRKLHPKQRPIPSAFCFLSHDHGRTWARGHFVAQDTLECQVAEVETGEQRVVTLNARSHLRFRVQAQSTNDGLDFQESQLVKKLVEPPPTGCQGSVISFPSPRSGPGSPAQWLLYTHPTHSWQRADLGAYLNPRPPAPEAWSEPVLLAKGSAAYSDLQSMGTGPDGSPLFGCLYEANDYEEIVFLMFTLKQAFPAEYLPQEPKSSDKTHTCPPCPAPELLGGPSVFLFPPKPKDTLMISRTPEVTCVVVDVSHEDPEVKFNWYVDGVEVHNAKTKPREEQYNSTYRVVSVLTVLHQDWLNGKEYKCKVSNKALPAPIEKTISKAKGQPREPQVYTLPPSREEMTKNQVSLYCLVKGFYPSDIAVEWESNGQPENNYKTTPPVLDSDGSFFLYSKLTVDKSRWQQGNVFSCSVMHEALHNHYTQKSLSLSPGK

SEQ ID NO: 192 - DNA, 1836 bp, Artificial Sequence
  Description of Artificial Sequence: Synthetic polynucleotide
gatgcatctctgccttacctgcagaaagaaagcgtgttccagtctggcgcccacgcctacagaattcccgctctgctgtatctgccaggccagcagtctctgctggctttcgctgaacagcgggccagcaagaaggatgagcacgccgaactgatcgtgctgcggagaggcgattacgacgccggcacacatcaggtgcagtggcaggctcaagaggtggtggctcaggctagactggacggccacagatctatgaacccctgtcctctgtacgatgaacagaccggcacactgtttctgttctttatcgctatccccggccaagtgaccgagcagcagcagctgcagacaagagccaacgtgaccagactgtgttacgtgacctccaccgaccacggcagaacctggtctagccctagagatctgaccgacgccgccatcggacctgcctatagagagtggtccaccttcgccgttggacctggacactgtctccagctgcacgacagggctagatctctggtggtgcctgcctacgcctatagaaagctgcaccccaaacagcggcctattcctagcgccttctgctttctgagccacgatcacggcaggacatgggccagaggacatttcgtggcccaggacacactggaatgccaggtggccgaagtggaaaccggcgagcagagagtcgtgaccctgaacgccagatctcacctgagattcagagtgcaggcccagagcacaaacgacggcctggatttccaagagagccagctggtcaagaaactggtggaacctcctccaaccggctgtcagggaagcgtgatcagctttccatctcctagaagcggccctggctctcctgctcagtggctgctgtatacacaccccacacacagctggcagagagccgatctgggcgcctacctgaatcctagacctcctgctcctgaggcttggagcgaacctgttctgctggccaagggcagcgctgcctacagcgatctgcagtctatgggcacaggccctgatggcagccctctgtttggctgtctgtacgaggccaacgactacgaagagatcgtgttcctgatgttcaccctgaagcaggcctttccagccgagtacctgcctcaagagcccaaatcttctgacaaaactcacacatgcccaccgtgcccagcacctgaactcctggggggaccgtcagtcttcctcttccccccaaaacccaaggacaccctcatgatctcccggacccctgaggtcacatgcgtggtggtggacgtgagccacgaagaccctgaggtcaagttcaactggtacgtggacggcgtggaggtgcataatgccaagacaaagccgcgggaggagcagtacaacagcacgtaccgtgtggtcagcgtcctcaccgtcctgcaccaggactggctgaatggcaaggagtacaagtgcaaggtctccaacaaagccctcccagcccccatcgagaaaaccatctccaaagccaaagggcagccccgagaaccacaggtctacaccctgcccccatcccgggaggagatgaccaagaaccaggtcagcctgtactgcctggtcaaaggcttctatcccagcgacatcgccgtggagtgggagagcaatgggcagccggagaacaactacaagaccacgcctcccgtgctggactccgacggctccttcttcctctatagcaagctcaccgtggacaagagcaggtggcagcaggggaacgtcttctcatgctccgtgatgcatgaggctctgcacaaccactacacgcagaagagcctctccctgtctccgggtaaa

SEQ ID NO: 193 - DNA, 1836 bp, Artificial Sequence
  Description of Artificial Sequence: Synthetic polynucleotide
gatgcatctctgccttacctgcagaaagaaagcgtgttccagtctggcgcccacgcctacagaattcccgctctgctgtatctgccaggccagcagtctctgctggctttcgctgaacagcgggccagcaagaaggatgagcacgccgaactgatcgtgctgcggagaggcgattacgacgccggcacacatcaggtgcagtggcaggctcaagaggtggtggctcaggctagactggacggccacagatctatgaacccctgtcctctgtacgatgaacagaccggcacactgtttctgttctttatcgctatccccggccaagtgaccgagcagcagcagctgcagacaagagccaacgtgaccagactgtgtcaagtgacctccaccgaccacggcagaacctggtctagccctagagatctgaccgacgccgccatcggacctgcctatagagagtggtccaccttcgccgttggacctggacactgtctccagctgcacgacagggctagatctctggtggtgcctgcctacgcctatagaaagctgcaccccaaacagcggcctattcctagcgccttctgctttctgagccacgatcacggcaggacatgggccagaggacatttcgtggcccaggacacactggaatgccaggtggccgaagtggaaaccggcgagcagagagtcgtgaccctgaacgccagatctcacctgagagccagagtgcaggcccagagcacaaacgacggcctggatttccaagagagccagctggtcaagaaactggtggaacctcctccacagggctgtcagggaagcgtgatcagctttccatctcctagaagcggccctggctctcctgctcagtggctgctgtatacacaccccacacacagctggcagagagccgatctgggcgcctacctgaatcctagacctcctgctcctgaggcttggagcgaacctgttctgctggccaagggcagcgctgcctacagcgatctgcagtctatgggcacaggccctgatggcagccctctgtttggctgtctgtacgaggccaacgactacgaagagatcgtgttcctgatgttcaccctgaagcaggcctttccagccgagtacctgcctcaagagcccaaatcttctgacaaaactcacacatgcccaccgtgcccagcacctgaactcctggggggaccgtcagtcttcctcttccccccaaaacccaaggacaccctcatgatctcccggacccctgaggtcacatgcgtggtggtggacgtgagccacgaagaccctgaggtcaagttcaactggtacgtggacggcgtggaggtgcataatgccaagacaaagccgcgggaggagcagtacaacagcacgtaccgtgtggtcagcgtcctcaccgtcctgcaccaggactggctgaatggcaaggagtacaagtgcaaggtctccaacaaagccctcccagcccccatcgagaaaaccatctccaaagccaaagggcagccccgagaaccacaggtctacaccctgcccccatcccgggaggagatgaccaagaaccaggtcagcctgacctgcctggtcaaaggcttctatcccagcgacatcgccgtggagtgggagagcaatgggcagccggagaacaactacaagaccacgcctcccgtgctggactccgacggctccttcttcctctatagcaagctcaccgtggacaagagcaggtggcagcaggggaacgtcttctcatgctccgtgatgcatgaggctctgcacaaccactacacgcagaagagcctctccctgtctccgggtaaa

SEQ ID NO: 194 - DNA, 1836 bp, Artificial Sequence
  Description of Artificial Sequence: Synthetic polynucleotide
gatgcatctctgccttacctgcagaaagaaagcgtgttccagtctggcgcccacgcctacagaattcccgctctgctgtatctgccaggccagcagtctctgctggctttcgctgaacagcgggccagcaagaaggatgagcacgccgaactgatcgtgctgcggagaggcgattacgacgccggcacacatcaggtgcagtggcaggctcaagaggtggtggctcaggctagactggacggccacagatctatgaacccctgtcctctgtacgatgaacagaccggcacactgtttctgttctttatcgctatccccggccaagtgaccgagcagcagcagctgcagacaagagccaacgtgaccagactgtgttacgtgacctccaccgaccacggcagaacctggtctagccctagagatctgaccgacgccgccatcggacctgcctatagagagtggtccaccttcgccgttggacctggacactgtctccagctgcacgacagggctagatctctggtggtgcctgcctacgcctatagaaagctgcaccccaaacagcggcctattcctagcgccttctgctttctgagccacgatcacggcaggacatgggccagaggacatttcgtggcccaggacacactggaatgccaggtggccgaagtggaaaccggcgagcagagagtcgtgaccctgaacgccagatctcacctgagagccagagtgcaggcccagagcacaaacgacggcctggatttccaagagagccagctggtcaagaaactggtggaacctcctccaaccggctgtcagggaagcgtgatcagctttccatctcctagaagcggccctggctctcctgctcagtggctgctgtatacacaccccacacacagctggcagagagccgatctgggcgcctacctgaatcctagacctcctgctcctgaggcttggagcgaacctgttctgctggccaagggcagcgctgcctacagcgatctgcagtctatgggcacaggccctgatggcagccctctgtttggctgtctgtacgaggccaacgactacgaagagatcgtgttcctgatgttcaccctgaagcaggcctttccagccgagtacctgcctcaagagcccaaatcttctgacaaaactcacacatgcccaccgtgcccagcacctgaactcctggggggaccgtcagtcttcctcttccccccaaaacccaaggacaccctcatgatctcccggacccctgaggtcacatgcgtggtggtggacgtgagccacgaagaccctgaggtcaagttcaactggtacgtggacggcgtggaggtgcataatgccaagacaaagccgcgggaggagcagtacaacagcacgtaccgtgtggtcagcgtcctcaccgtcctgcaccaggactggctgaatggcaaggagtacaagtgcaaggtctccaacaaagccctcccagcccccatcgagaaaaccatctccaaagccaaagggcagccccgagaaccacaggtctacaccctgcccccatcccgggaggagatgaccaagaaccaggtcagcctgacctgcctggtcaaaggcttctatcccagcgacatcgccgtggagtgggagagcaatgggcagccggagaacaactacaagaccacgcctcccgtgctggactccgacggctccttcttcctctatagcaagctcaccgtggacaagagcaggtggcagcaggggaacgtcttctcatgctccgtgatgcatgaggctctgcacaaccactacacgcagaagagcctctccctgtctccgggtaaa

SEQ ID NO: 195 - DNA, 1836 bp, Artificial Sequence
  Description of Artificial Sequence: Synthetic polynucleotide
gatgcatctctgccttacctgcagaaagaaagcgtgttccagtctggcgcccacgcctacagaattcccgctctgctgtatctgccaggccagcagtctctgctggctttcgctgaacagcgggccagcaagaaggatgagcacgccgaactgatcgtgctgcggagaggcgattacgacgccggcacacatcaggtgcagtggcaggctcaagaggtggtggctcaggctagactggacggccacagatctatgaacccctgtcctctgtacgatgaacagaccggcacactgtttctgttctttatcgctatccccggccaagtgaccgagcagcagcagctgcagacaagagccaacgtgaccagactgtgttacgtgacctccaccgaccacggcagaacctggtctagccctagagatctgaccgacgccgccatcggacctgcctatagagagtggtccaccttcgccgttggacctggacactgtctccagctgcacgacagggctagatctctggtggtgcctgcctacgcctatagaaagctgcaccccaaacagcggcctattcctagcgccttctgctttctgagccacgatcacggcaggacatgggccagaggacatttcgtggcccaggacacactggaatgccaggtggccgaagtggaaaccggcgagcagagagtcgtgaccctgaacgccagatctcacctgagattcagagtgcaggcccagagcacaaacgacggcctggatttccaagagagccagctggtcaagaaactggtggaacctcctccaaccggctgtcagggaagcgtgatcagctttccatctcctagaagcggccctggctctcctgctcagtggctgctgtatacacaccccacacacagctggcagagagccgatctgggcgcctacctgaatcctagacctcctgctcctgaggcttggagcgaacctgttctgctggccaagggcagcgctgcctacagcgatctgcagtctatgggcacaggccctgatggcagccctctgtttggctgtctgtacgaggccaacgactacgaagagatcgtgttcctgatgttcaccctgaagcaggcctttccagccgagtacctgcctcaagagcccaaatcttctgacaaaactcacacatgcccaccgtgcccagcacctgaactcctggggggaccgtcagtcttcctcttccccccaaaacccaaggacaccctcatgatctcccggacccctgaggtcacatgcgtggtggtggacgtgagccacgaagaccctgaggtcaagttcaactggtacgtggacggcgtggaggtgcataatgccaagacaaagccgcgggaggagcagtacaacagcacgtaccgtgtggtcagcgtcctcaccgtcctgcaccaggactggctgaatggcaaggagtacaagtgcaaggtctccaacaaagccctcccagcccccatcgagaaaaccatctccaaagccaaagggcagccccgagaaccacaggtctacaccctgcccccatcccgggaggagatgaccaagaaccaggtcagcctgacctgcctggtcaaaggcttctatcccagcgacatcgccgtggagtgggagagcaatgggcagccggagaacaactacaagaccacgcctcccgtgctggactccgacggctccttcttcctctatagcaagctcaccgtggacaagagcaggtggcagcaggggaacgtcttctcatgctccgtgatgcatgaggctctgcacaaccactacacgcagaagagcctctccctgtctccgggtaaa

SEQ ID NO: 196 - protein, 380 aa, Artificial Sequence
  Description of Artificial Sequence: Synthetic polypeptide
DASLPYLQKESVFQSGAHAYRIPALLYLPGQQSLLAFAEQRASKKDEHAELIVLRRGDYDAGTHQVQWQAQEVVAQARLDGHRSMNPCPLYDEQTGTLFLFFIAIPGQVTEQQQLQTRANVTRLCYVTSTDHGRTWSSPRDLTDAAIGPAYREWSTFAVGPGHCLQLHDRARSLVVPAYAYRKLHPKQRPIPSAFCFLSHDHGRTWARGHFVAQDTLECQVAEVETGEQRVVTLNARSHLRARVQAQSTNDGLDFQESQLVKKLVEPPPQGCQGSVISFPSPRSGPGSPAQWLLYTHPTHSWQRADLGAYLNPRPPAPEAWSEPVLLAKGSAAYSDLQSMGTGPDGSPLFGCLYEANDYEEIVFLMFTLKQAFPAEYLPQ

SEQ ID NO: 197 - protein, 612 aa, Artificial Sequence
  Description of Artificial Sequence: Synthetic polypeptide
DASLPYLQKESVFQSGAHAYRIPALLYLPGQQSLLAFAEQRASKKDEHAELIVLRRGDYDAGTHQVQWQAQEVVAQARLDGHRSMNPCPLYDEQTGTLFLFFIAIPGQVTEQQQLQTRANVTRLCYVTSTDHGRTWSSPRDLTDAAIGPAYREWSTFAVGPGHCLQLHDRARSLVVPAYAYRKLHPKQRPIPSAFCFLSHDHGRTWARGHFVAQDTLECQVAEVETGEQRVVTLNARSHLRARVQAQSTNDGLDFQESQLVKKLVEPPPQGCQGSVISFPSPRSGPGSPAQWLLYTHPTHSWQRADLGAYLNPRPPAPEAWSEPVLLAKGSAAYSDLQSMGTGPDGSPLFGCLYEANDYEEIVFLMFTLKQAFPAEYLPQEPKSSDKTHTCPPCPAPELLGGPSVFLFPPKPKDTLMISRTPEVTCVVVDVSHEDPEVKFNWYVDGVEVHNAKTKPREEQYNSTYRVVSVLTVLHQDWLNGKEYKCKVSNKALPAPIEKTISKAKGQPREPQVYTLPPSREEMTKNQVSLTCLVKGFYPSDIAVEWESNGQPENNYKTTPPVLDSDGSFFLTSKLTVDKSRWQQGNVFSCSVMHEALHNHYTQKSLSLSPGK

SEQ ID NO: 198 - protein, 612 aa, Artificial Sequence
  Description of Artificial Sequence: Synthetic polypeptide
DASLPYLQKESVFQSGAHAYRIPALLYLPGQQSLLAFAEQRASKKDEHAELIVLRRGDYDAGTHQVQWQAQEVVAQARLDGHRSMNPCPLYDEQTGTLFLFFIAIPGQVTEQQQLQTRANVTRLCYVTSTDHGRTWSSPRDLTDAAIGPAYREWSTFAVGPGHCLQLHDRARSLVVPAYAYRKLHPKQRPIPSAFCFLSHDHGRTWARGHFVAQDTLECQVAEVETGEQRVVTLNARSHLRARVQAQSTNDGLDFQESQLVKKLVEPPPQGCQGSVISFPSPRSGPGSPAQWLLYTHPTHSWQRADLGAYLNPRPPAPEAWSEPVLLAKGSAAYSDLQSMGTGPDGSPLFGCLYEANDYEEIVFLMFTLKQAFPAEYLPQEPKSSDKTHTCPPCPAPELLGGPSVFLFPPKPKDTLMISRTPEVTCVVVDVSHEDPEVKFNWYVDGVEVHNAKTKPREEQYNSTYRVVSVLTVLHQDWLNGKEYKCKVSNKALPAPIEKTISKAKGQPREPQVYTLPPSREEMTKNQVSLTCLVKGFYPSDIAVEWESNGQPENNYKTTPPVLDSDGSFFLYSKLTVDKSRWQQGNVFSCSVMHEALHNHYTQKSLSLSPGK

SEQ ID NO: 199 - protein, 869 aa, Artificial Sequence
  Description of Artificial Sequence: Synthetic polypeptide
DASLPYLQKESVFQSGAHAYRIPALLYLPGQQSLLAFAEQRASKKDEHAELIVLRRGDYDAGTHQVQWQAQEVVAQARLDGHRSMNPCPLYDEQTGTLFLFFIAIPGQVTEQQQLQTRANVTRLCYVTSTDHGRTWSSPRDLTDAAIGPAYREWSTFAVGPGHCLQLHDRARSLVVPAYAYRKLHPKQRPIPSAFCFLSHDHGRTWARGHFVAQDTLECQVAEVETGEQRVVTLNARSHLRARVQAQSTNDGLDFQESQLVKKLVEPPPQGCQGSVISFPSPRSGPGSPAQWLLYTHPTHSWQRADLGAYLNPRPPAPEAWSEPVLLAKGSAAYSDLQSMGTGPDGSPLFGCLYEANDYEEIVFLMFTLKQAFPAEYLPQEPKSSDKTHTCPPCPAPELLGGPSVFLFPPKPKDTLMISRTPEVTCVVVDVSHEDPEVKFNWYVDGVEVHNAKTKPREEQYNSTYRVVSVLTVLHQDWLNGKEYKCKVSNKALPAPIEKTISKAKGQPREPQVYTLPPSREEMTKNQVSLTCLVKGFYPSDIAVEWESNGQPENNYKTTPPVLDSDGSFFLYSKLTVDKSRWQQGNVFSCSVMHEALHNHYTQKSLSLSPGKGGGGSGGGGSGGGGSEVQLVESGGGLVQPGGSLRLSCAASGFNIKDTYIHWVRQAPGKGLEWVARIYPTNGYTRYADSVKGRFTISADTSKNTAYLQMNSLRAEDTAVYYCSRWGGDGFYAMDYWGQGTLVTVSSGGGGSGGGGSGGGGSDIQMTQSPSSLSASVGDRVTITCRASQDVNTAVAWYQQKPGKAPKLLIYSASFLYSGVPSRFSGSRSGTDFTLTISSLQPEDFATYYCQQHYTTPPTFGQGTKVEIK

SEQ ID NO: 200 - protein, 617 aa, Artificial Sequence
  Description of Artificial Sequence: Synthetic polypeptide
DASLPYLQKESVFQSGAHAYRIPALLYLPGQQSLLAFAEQRASKKDEHAELIVLRRGDYDAGTHQVQWQAQEVVAQARLDGHRSMNPCPLYDEQTGTLFLFFIAIPGQVTEQQQLQTRANVTRLCYVTSTDHGRTWSSPRDLTDAAIGPAYREWSTFAVGPGHCLQLHDRARSLVVPAYAYRKLHPKQRPIPSAFCFLSHDHGRTWARGHFVAQDTLECQVAEVETGEQRVVTLNARSHLRARVQAQSTNDGLDFQESQLVKKLVEPPPQGCQGSVISFPSPRSGPGSPAQWLLYTHPTHSWQRADLGAYLNPRPPAPEAWSEPVLLAKGSAAYSDLQSMGTGPDGSPLFGCLYEANDYEEIVFLMFTLKQAFPAEYLPQGGGGSGGGGSDKTHTCPPCPAPELLGGPSVFLFPPKPKDTLMISRTPEVTCVVVDVSHEDPEVKFNWYVDGVEVHNAKTKPREEQYNSTYRVVSVLTVLHQDWLNGKEYKCKVSNKALPAPIEKTISKAKGQPREPQVYTLPPSREEMTKNQVSLTCLVKGFYPSDIAVEWESNGQPENNYKTTPPVLDSDGSFFLTSKLTVDKSRWQQGNVFSCSVMHEALHNHYTQKSLSLSPGK

SEQ ID NO: 201 - DNA, 1836 bp, Artificial Sequence
  Description of Artificial Sequence: Synthetic polynucleotide
gatgcatctctgccttacctgcagaaagaaagcgtgttccagtctggcgcccacgcctacagaattcccgctctgctgtatctgccaggccagcagtctctgctggctttcgctgaacagcgggccagcaagaaggatgagcacgccgaactgatcgtgctgcggagaggcgattacgacgccggcacacatcaggtgcagtggcaggctcaagaggtggtggctcaggctagactggacggccacagatctatgaacccctgtcctctgtacgatgaacagaccggcacactgtttctgttctttatcgctatccccggccaagtgaccgagcagcagcagctgcagacaagagccaacgtgaccagactgtgttacgtgacctccaccgaccacggcagaacctggtctagccctagagatctgaccgacgccgccatcggacctgcctatagagagtggtccaccttcgccgttggacctggacactgtctccagctgcacgacagggctagatctctggtggtgcctgcctacgcctatagaaagctgcaccccaaacagcggcctattcctagcgccttctgctttctgagccacgatcacggcaggacatgggccagaggacatttcgtggcccaggacacactggaatgccaggtggccgaagtggaaaccggcgagcagagagtcgtgaccctgaacgccagatctcacctgagagccagagtgcaggcccagagcacaaacgacggcctggatttccaagagagccagctggtcaagaaactggtggaacctcctccacagggctgtcagggaagcgtgatcagctttccatctcctagaagcggccctggctctcctgctcagtggctgctgtatacacaccccacacacagctggcagagagccgatctgggcgcctacctgaatcctagacctcctgctcctgaggcttggagcgaacctgttctgctggccaagggcagcgctgcctacagcgatctgcagtctatgggcacaggccctgatggcagccctctgtttggctgtctgtacgaggccaacgactacgaagagatcgtgttcctgatgttcaccctgaagcaggcctttccagccgagtacctgcctcaagagcccaaatcttctgacaaaactcacacatgcccaccgtgcccagcacctgaactcctggggggaccgtcagtcttcctcttccccccaaaacccaaggacaccctcatgatctcccggacccctgaggtcacatgcgtggtggtggacgtgagccacgaagaccctgaggtcaagttcaactggtacgtggacggcgtggaggtgcataatgccaagacaaagccgcgggaggagcagtacaacagcacgtaccgtgtggtcagcgtcctcaccgtcctgcaccaggactggctgaatggcaaggagtacaagtgcaaggtctccaacaaagccctcccagcccccatcgagaaaaccatctccaaagccaaagggcagccccgagaaccacaggtctacaccctgcccccatcccgggaggagatgaccaagaaccaggtcagcctgacctgcctggtcaaaggcttctatcccagcgacatcgccgtggagtgggagagcaatgggcagccggagaacaactacaagaccacgcctcccgtgctggactccgacggctccttcttcctctatagcaagctcaccgtggacaagagcaggtggcagcaggggaacgtcttctcatgctccgtgatgcatgaggctctgcacaaccactacacgcagaagagcctctccctgtctccgggtaaa

SEQ ID NO: 202 - protein, 10 aa, Artificial Sequence
  Description of Artificial Sequence: Synthetic 10xHis tag
HHHHHHHHHH
